(19) United States
(12) Patent Application Publication
(10) Pub. No.: US 2009/0098533 A1
(43) Pub. Date: Apr. 16, 2009

(54) Methods and kits for investigating cancer

(76) Inventors: Marc Munnes, Erkrath (DE); Hans Bojar, Langenfeld (DE)

Correspondence Address: SIEMENS CORPORATION;INTELLECTUAL PROPERTY DEPARTMENT, 170 WOOD AVENUE SOUTH, ISELIN, NJ, 08830, US

(21) Appl. No.: 10/561,485

(22) PCT Filed: Oct. 2, 2004
(86) PCT No.: PCT/EP04/11009

§ 371 Date: Aug. 28, 2006

(30) Foreign Application Priority Data
Oct. 6, 2003 (EP) 03022587.4
Jun. 30, 2004 (EP) 04015374.4

(51) Int. Cl. C12Q 1/68; G06F 19/00

(52) U.S. Cl. 435/6; 702/20

(57) ABSTRACT

The invention provides novel compositions, methods and uses, for the prediction, diagnosis, prognosis, prevention and treatment of malignant neoplasia and breast cancer. The invention further relates to genes that are differentially expressed in breast tissue of breast cancer patients versus those of normal “healthy” tissue. Differentially expressed genes for the identification of patients which are likely to respond to chemotherapy are also provided.

### TECHNICAL FIELD OF THE INVENTION

[0001] The present invention relates to methods and compositions for the prediction of therapy outcome (e.g. tumor response to therapy), diagnosis, prognosis, prevention and treatment of neoplastic diseases. Cancer cells display a specific pattern of gene expression related to their morphological type, state of progression, acquirement of genomic alterations, point mutations in critical genes such as gatekeepers and tumor suppressors or due to the dependency of external signals such as growth factors, hormones or other secondary messengers.

[0002] The invention discloses genes which show an altered expression in a particular neoplastic tissue compared to the corresponding healthy tissue or to other neoplastic lesions unresponsive to a given chemotherapy. They are useful as diagnostic markers and could be also regarded as therapeutically targets. Methods are disclosed for predicting, diagnosing and prognosing as well as preventing and treating neoplastic disease. The genes disclosed in this invention have been identified in breast cancers but are predictable of outcome to a certain therapy regimen and therefor they are also relevant for other types of cancers in tissues other than breast.

### BACKGROUND OF THE INVENTION AND PRIOR ART

[0003] Cancer is the second leading cause of death in the United States after cardiovascular disease. One in three Americans will develop cancer in his or her lifetime, and one of every four Americans will die of cancer. More specifically breast cancer claims the lives of approximately 40,000 women and is diagnosed in approximately 200,000 women annually in the United States alone. Cancer are classified based on different parameters, such as tumor size, invasion status, involvement of lymph notes, metastasis, histolopathology, immunohistochemical markers, and molecular markers (WHO. International Classification of diseases (1); Sabin and Wittekind, 1997 (2)). With the recent advances in gene chip technology, researchers are increasingly focusing on the categorization of tumors based on the distinct expression of marker genes Sorlie et al., 2001 (3): van 't Veer et al., 2002 (4).

[0004] Chemotherapy remains a mainstay in therapeutic regimens offered to patients with breast cancer, particularly those who have cancer that has metastasized from its site of origin (Perez, 1999, (5)). There are several chemotherapeutic agents that have demonstrated activity in the treatment of breast cancer and research is continuously in an attempt to determine optimal drugs and regimens. However, different patients tend to respond differently to the same therapeutic regimen. Currently, the individuals response to certain therapy can only be assessed statistically, based on data of former clinical studies. There are still a great number of patients who will not benefit from a systemic chemotherapy. Especially, breast cancers are very heterogeneous in their aggressiveness and treatment response. They contain different genetic mutations and variations affecting growths characteristic and sensitivity to several drugs. Identification of each tumor's molecular fingerprint, then, could help to segregate patients who have particularly aggressive tumors or who need to be treated with specific beneficial therapies. As research involving genetics and associated responses to treatment matures, standard practice will undoubtedly become more individualized, enabling physicians to provide specific treatment regimens matched with a tumor's genetic profiles to ensure optimal outcomes.

### SUMMARY OF THE INVENTION

[0005] The present invention relates to the identification of 185 human genes being differentially expressed in neoplastic tissue resulting in an altered clinical behavior of a neoplastic lesion. The differential expression of these 185 genes is not limited to a specific neoplastic lesion in a certain tissue of the human body.

[0006] In preferred embodiments of this invention the neoplastic lesion, of which these 185 genes are altered in their expression is a cancer of the human breast. This cancer is not limited to females and may also be diagnosed and analyzed in males.

[0007] The invention relates to various methods, reagents and kits for diagnosing, staging, prognosis, monitoring and therapy of breast cancer. “Breast cancer” as used herein includes carcinomas, (e.g., carcinoma in situ, invasive carcinoma, metastatic carcinoma) and pre-malignant conditions, neomorphic changes independent of their histological origin (e.g. ductal, lobular, medullary, mixed origin). The compositions, methods, and kits of the present invention comprise comparing the level of mRNA expression of a single or plurality (e.g. 2, 5, 10, or 50 or more) of genes (hereinafter “marker genes”, listed in Table 1a and 1b, SEQ ID NO:1 to 165 and 472 to 491, the respective polypeptide sequences coded by them are numerated SEQ ID NO: 166 to 330 and 492 to 511, see also Table 1a and 1b) in a patient sample, and the average level of expression of the marker gene(s) in a sample from a control subject (e.g., a human subject without breast cancer). A preferred sub-set of marker genes representing a specific test composition or kit is listed in Table 2.

[0008] The invention relates further to various compositions, methods, reagents and kits, for prediction of clinically measurable tumor therapy response to a given breast cancer therapy. The compositions, methods, and kits of the present invention comprise comparing the level of mRNA expression of a single or plurality (e.g. 2, 5, 10, or 50 or more) of breast cancer marker genes in an unclassified patient sample, and the average level of expression of the marker gene(s) in a sample cohort comprising patient responding in different intensity to an administered breast cancer therapy. In preferred embodiments of this invention the specific expression of the marker genes can be utilized for discrimination of responders and non-responders to an anthracycline based (e.g. polychemotherapies with epirubicin or doxorubicin) chemo-therapeutic intervention.

[0009] In further preferred embodiments, the control level of mRNA expression is the average level of expression of the marker gene(s) in samples from several (e.g., 2, 3, 4, 5, 8, 10, 12, 15, 20, 30 or 50) control subjects. These control subjects may either be not affected by breast cancer or be identified and classified by their clinical response prior to the determination of their individual expression profile.

[0010] As elaborated below, a significant change in the level of expression of one or more of the marker genes (set of marker genes) in the patient sample relative to the control level provides significant information regarding the patient's breast cancer status and responsiveness to chemotherapy. In the compositions, methods, and kits of the present invention the marker genes listed in Table 1a and 1b may also be used in combination with well known breast cancer marker genes (e.g. CEA, mammaglobin, or CA 15-3)

[0011] According to the invention, the marker gene(s) and marker gene sets are selected such that the positive predictive value of the compositions, methods, and kits of the invention is at least about 10%, preferably about 25%, more preferably about 50% and most preferably about 90%. Also preferred for use in the compositions, methods, and kits of the invention are marker gene(s) and sets that are differentially expressed, as compared to normal breast cells, by at least the minimal mean differential expression factor presented in Table 3, in at least about 20%, more preferably about 50% and most preferably about 75% of any of the following conditions: stage 0 breast cancer patients, stage I breast cancer patients, stage II breast cancer patients, stage III breast cancer patients, stage IV breast cancer patients, grade I breast cancer patients, grade II breast cancer patients, grade III breast cancer patients, malignant breast cancer patients, patients with primary carcinomas of the breast, and all other types of cancers, malignancies and transformations associated with the breast.

[0012] The detection of marker gene expression is not limited to the detection within a primary, secondary or metastatic lesion of breast cancer patients, and may also be detected in lymph nodes affected by breast cancer cells or minimal residual disease cells either locally deposited (e.g. bone marrow, liver, kidney) or freely floating throughout the patients body.

[0013] In one embodiment of the compositions, methods, reagents and kits of the present invention, the sample to be analyzed is tissue material from neoplastic lesion taken by aspiration or punctuation, excision or by any other surgical method leading to biopsy or resected cellular material. In one embodiment of the compositions, methods, and kits of the present invention, the sample comprises cells obtained from the patient. The cells may be found in a breast cell “smear” collected, for example, by a nipple aspiration, ductal lavarge, fine needle biopsy or from provoked or spontaneous nipple discharge. In another embodiment, the sample is a body fluid. Such fluids include, for example, blood fluids, lymph, ascitic fluids, gynecological fluids, or urine but not limited to these fluids.

[0014] In accordance with the compositions, methods, and kits of the present invention the determination of gene expression is not limited to any specific method or to the detection of mRNA. The presence and/or level of expression of the marker gene in a sample can be assessed, for example, by measuring and/or quantifying of:
[0015] 1) a protein encoded by the marker gene in Table 1a and 1b (SEQ ID NO:1 to 165 and 472 to 491) or a polypeptide comprising a polypeptide selected from SEQ ID NO:166 to 330 and 492 to 511 or a polypeptide resulting from processing or degradation of the protein (e.g. using a reagent, such as an antibody, an antibody derivative, or an antibody fragment, which binds specifically with the protein or polypeptide)
[0016] 2) a metabolite which is produced directly (i.e., catalyzed) or indirectly by a protein encoded by the marker gene in Table 1a and 1b (SEQ ID NO:1 to 165 and 472 to 491) or by a polypeptide comprising a polypeptide selected from SEQ ID NO:166 to 330 and 492 to 511
[0017] 3) a RNA transcript (e.g., mRNA, hnRNA) encoded by the marker gene in Table 1a and 1b, or a fragment of the RNA transcript (e.g. by contacting a mixture of RNA transcripts obtained from the sample or cDNA prepared from the transcripts with a substrate having nucleic acid comprising a sequence of one or more of the marker genes listed within Table 1a and 1b fixed thereto at selected positions). The mRNA expression of these genes can be detected e.g. with DNA-microarrays as provided by Affymetrix Inc. or other manufacturers. U.S. Pat. No. 5,556,752. In a further embodiment the expression of these genes can be detected with bead based direct fluorescent readout techniques such as provided by Luminex Inc. PCT No. WO 97/14028.

[0018] In one aspect, the present invention provides a composition, method, and kit of assessing whether a patient is afflicted with breast cancer (e.g., new detection or “screening”, detection of recurrence, reflex testing, especially in patients having an enhanced risk of developing breast cancer (e.g., patients having a familial history of breast cancer and patients identified as having a mutant oncogene). For this purpose the composition, method, and kit comprises comparing:
[0019] a) the level of expression of a single or plurality of marker genes in a patient sample, wherein at least one (e.g. 2, 5, 10, or 50 or more) of the marker genes is selected from the marker genes of Table 1a and 1b and
[0020] b) the normal level of expression of the marker gene in a control subject without breast cancer.

[0021] A significant increase as well as decrease in the level of expression of the selected marker genes (e.g. 2, 5, 10, or 50 or more) in the patient sample relative to each marker gene's normal level of expression is an indication that the patient is afflicted with breast cancer.

[0022] The composition, method, and kit of the present invention is also useful for prognosing the progression or the outcome of the malignant neoplasia. For this purpose the composition, method, and kit comprises comparing
[0023] a) the level of expression of a single or plurality of marker genes in a patient sample, wherein at least one (e.g. 2, 5, 10, or 50 or more) of the marker genes is selected from the marker genes of Table 1a and 1b
[0024] b) a control pattern of expression of these marker genes.

[0025] The composition, method, and kit of the present invention is particularly useful for identifying patients who will respond to a certain chemotherapy. For this purpose the composition, method, and kit comprises comparing
[0026] a) the level of expression of a single or plurality of marker genes in a patient sample, wherein at least one (e.g. 2, 5, 10, or 50 or more) of the marker genes is selected from the marker genes of Table 1a and 1b and
[0027] b) the level of expression of the marker gene in a control subject. The control subject may either be not affected by breast cancer or be identified and classified by their clinical response to the particular chemotherapy.

[0028] In another aspect, the invention provides a composition, method, and kit of assessing the efficacy of a therapy for inhibiting breast cancer in a patient. This composition, method, and kit comprises comparing:
[0029] a) expression of a single or plurality of marker genes in a first sample obtained from the patient prior to any treatment of the patient, wherein at least one of the marker genes is selected from the marker genes listed within Table 1a and 1b and
[0030] b) expression of the marker gene in a second sample obtained from the patient following at least one dose of the therapy.

[0031] It will be appreciated that in this composition, method, and kit the “therapy” may be any therapy for treating breast cancer including, but not limited to, chemotherapy, anti-hormonal therapy, directed antibody therapy, radiation therapy and surgical removal of tissue, e.g., a breast tumor. Thus, the compositions, methods, and kits of the invention may be used to evaluate a patient before, during and after therapy, for example, to evaluate the reduction in tumor burden.

[0032] In a further aspect, the present invention provides a composition, method, and kit for monitoring the progression of breast cancer in a patient. This composition, method, and kit comprising:
[0033] a) detecting in a patient sample at a first time point, the expression of a single or plurality of marker genes, wherein at least one of the marker genes is selected from the marker genes listed in Table 1a and 1b
[0034] b) repeating step a) at a subsequent time point in time; and
[0035] c) comparing the level of expression of each marker gene detected in steps a) and b), and therefrom monitoring the progression of breast cancer in the patient.

[0036] In another aspect, the invention provides a composition, method, and kit for in vitro selection of a therapy regime (e.g. the kind of chemotherapeutical argents) for inhibiting breast cancer in a patient. This composition, method, and kit comprises the steps of:
[0037] a) obtaining a sample comprising cancer cells from the patient;
[0038] b) separately maintaining aliquots of the sample in the presence of a diverse test compositions;
[0039] c) comparing expression of a single or plurality of marker genes, selected from the marker genes listed in Table 1a and 1b;
   in each of the aliquots; and
[0040] d) selecting one of the test compositions which induces a lower level of expression of genes from SEQ ID 11, 17, 22, 25, 31, 36, 48, 49, 57, 83, 107, 108, 112, and 159 and/or a higher level of expression of genes from SEQ ID 24, 47, 54, 58, 59, 60, 67, 79, 80, 88, 114, 118, 135, and 141 in the aliquot containing that test composition, relative to the level of expression of each marker gene in the aliquots containing the other test compositions.

[0041] The invention further provides a composition, method, and kit of assessing the carcinogenic potential of a certain biological or chemical compound. This composition, method, and kit comprises the steps of:
[0042] a) maintaining separate aliquots of breast cells in the presence and absence of the test compound; and
[0043] b) comparing expression of a singe or plurality of marker genes in each of the aliquots, wherein at least one of the genes is selected from the marker genes listed within Table 1a and 1b, A significant increase in the level of expression of genes from SEQ ID 19, 23, 36, 45, 62, 74, 81, 96, 103, 106, 107, 112, 113, and 132 and/or a significant decrease of genes from SEQ ID 22, 25, 31, 40, 43, 47, 55, 57, 59, 60, 108, 119, 121, 124, 154, 156, 157, 158, 159, 160, 162, and 164 in the aliquot maintained in the presence of (or exposed to) the test compound, relative to the level of expression of each marker gene in the aliquot maintained in the absence of the test compound, is an indication that the test compound possesses breast carcinogenic potential.

[0044] The invention further provides a composition, method, and kit of treating a patient afflicted with breast cancer. This composition, method, and kit comprises providing to cells of the patient an antisense oligonucleotide complementary to a polynucleotide sequence of a marker gene listed within Table 1a and 1b

[0045] The invention additionally provides a composition, method, and kit of inhibiting breast cancer cells in a patient at risk for developing breast cancer. This composition, method, and kit comprises inhibiting expression of a marker gene listed in Table 1a and 1b.

[0046] In yet another embodiment the invention provides compositions, methods, and kits of screening for agents which regulate the activity of a polypeptide comprising a polypeptide selected from SEQ ID NO: 166 to 330 and 492 to 511. A test compound is contacted with the particular polypeptide. Binding of the test compound to the polypeptide is detected. A test compound which binds to the polypeptide is thereby identified as a potential therapeutic agent for the treatment of malignant neoplasia and more particularly breast cancer.

[0047] In even another embodiment the invention provides another composition, method, and kit of screening for agents which regulate the activity of a polypeptide comprising a polypeptide selected from SEQ ID NO: 166 to 330 and 492 to 511. A test compound is contacted with the particular polypeptide. A biological activity mediated by the polypeptide is detected. A test compound which decreases the biological activity is thereby identified as a potential therapeutic agent for decreasing the activity of the particular polypeptide in malignant neoplasia and especially in breast cancer A test compound which increases the biological activity is thereby identified as a potential therapeutic agent for increasing the activity of the particular polypeptide in malignant neoplasia and especially in breast cancer

[0048] The invention thus provides polypeptides selected from one of the polypeptides with SEQ ID NO: 166 to 330 and 492 to 511 which can be used to identify compounds which may act, for example, as regulators or modulators such as agonists and antagonists, partial agonists, inverse agonists, activators, co-activators and inhibitors of the polypeptide comprising a polypeptide selected from SEQ ID NO: 166 to 330 and 492 to 511 Accordingly, the invention provides reagents and compositions, methods, and kits for regulating a polypeptide comprising a polypeptide selected from SEQ ID NO: 166 to 330 and 492 to 511 in malignant neoplasia and more particularly breast cancer. The regulation can be an up- or down regulation. Reagents that modulate the expression, stability or amount of a polynucleotide listed in Table 1a and 1b (SEQ ID NO: 1 to 165 and 472 to 491 or the activity of the polypeptide comprising a polypeptide selected from SEQ ID NO: 166 to 330 and 492 to 511 can be a protein, a peptide, a peptidomimetic, a nucleic acid, a nucleic acid analogue (e.g. peptide nucleic acid, locked nucleic acid) or a small molecule. Compositions, methods, and kits that modulate the expression, stability or amount of a polynucleotide comprising a polynucleotide selected from SEQ ID NO: 1 to 165 and 472 to 491 (listed in Table 1a and 1b) or the activity of the polypeptide comprising a polypeptide selected from SEQ ID NO: 166 to 330 and 492 to 511 (Table 1) can be gene replacement therapies, antisense, ribozyme and triplex nucleic acid approaches.

[0049] The invention further provides a composition, method, and kit of making an isolated hybridoma which produces an antibody useful for assessing whether a patient is afflicted with breast cancer. The composition, method, and kit comprises isolating a protein encoded by a marker gene listed within Table 1a and 1b or a polypeptide fragment of the protein, immunizing a mammal using the isolated protein or polypeptide fragment, isolating splenocytes from the immunized mammal, fusing the isolated splenocytes with an immortalized cell line to form hybridomas, and screening individual hybridomas for production of an antibody which specifically binds with the protein or polypeptide fragment to isolate the hybridoma. The invention also includes an antibody produced by this method. Such antibodies specifically bind to a full-length or partial polypeptide comprising a polypeptide selected from SEQ ID NO: 166 to 330 and 492 to 511 (listed in Table 1a and 1b) for use in prediction, prevention, diagnosis, prognosis and treatment of malignant neoplasia and breast cancer in particular.

[0050] Yet another embodiment of the invention is the use of a reagent which specifically binds to a polynucleotide comprising a polynucleotide selected from SEQ ID NO: 1 to 165 and 472 to 491 or to a polypeptide comprising a polypeptide selected from SEQ ID NO: 166 to 330 and 492 to 511 (listed in Table 1a and 1b) in the preparation of a medicament for the treatment of malignant neoplasia and breast cancer in particular.

[0051] Still another embodiment is the use of a reagent that modulates the activity or stability of a polypeptide comprising a polypeptide selected from SEQ ID NO: 166 to 330 and 492 to 511 (Table 1a and 1b) or the expression, amount or stability of a polynucleotide comprising a polynucleotide selected from SEQ ID NO: 1 to 165 and 472 to 491 (Table 1a and 1b) in the preparation of a medicament for the treatment of malignant neoplasia and breast cancer in particular.

[0052] Still another embodiment of the invention is a pharmaceutical composition which includes a reagent which specifically binds to a polynucleotide comprising a polynucleotide selected from SEQ ID NO: 1 to 165 (Table 1) or a polypeptide comprising a polypeptide selected from SEQ ID NO: 166 to 300, and a pharmaceutically acceptable carrier.

[0053] A further embodiment of the invention is a pharmaceutical composition comprising a polynucleotide including a sequence which hybridizes under stringent conditions to a polynucleotide comprising a polynucleotide selected from SEQ ID NO: 1 to 165 and 472 to 491 and encoding a polypeptide exhibiting the same biological function as given for the respective polynucleotide in Table 1a and 1b or 4, or encoding a polypeptide comprising a polypeptide selected from SEQ ID NO: 166 to 330 and 492 to 511. Pharmaceutical compositions, useful in the present invention may further include fusion proteins comprising a polypeptide comprising a polynucleotide selected from SEQ ID NO: 1 to 165 and 472 to 491, or a fragment thereof, antibodies, or antibody fragments

[0054] The invention also provides various kits. Such kit comprises reagents for assessing expression of a single or a plurality of genes selected from the marker genes listed in Table 1a and 1b or selected from the sub-set of genes listed in Table 2.

[0055] In one aspect, the invention provides a kit for assessing whether a patient is afflicted with breast cancer.

[0056] In another aspect, the invention provides a kit for assessing the suitability of each of a plurality of compounds for inhibiting a breast cancer in a patient. The kit comprises reagents for assessing expression of a marker gene listed within Table 1a and 1b, or reagents for assessing the expression of each marker gene of a marker gene set listed in Table 2. The kit may also comprise a plurality of compounds.

[0057] In an additional aspect, the invention provides a kit for assessing the presence of breast cancer cells. This kit comprises an antibody, wherein the antibody binds specifically with a protein encoded by a marker gene listed within Table 1a and 1b or polypeptide fragment of the protein. The kit may also comprise a plurality of antibodies, wherein the plurality binds specifically with-the protein encoded by each marker gene of a marker gene set listed in Table 2.

[0058] In yet another aspect, the invention provides a kit for assessing the presence of breast cancer cells, wherein the kit comprises a nucleic acid probe. The probe hybridizes specifically with a RNA transcript of a marker gene listed within Table 1a and 1b or cDNA of the transcript. The kit may also comprise a plurality of probes, wherein each of the probes hybridizes specifically with a RNA transcript of one of the marker genes of a marker gene set listed in Table 2.

[0059] It will be appreciated that the compositions, methods, and kits of the present invention may also include known cancer marker genes including known breast cancer marker genes. It will further be appreciated that the compositions, methods, and kits may be used to identify cancers other than breast cancer.

### DETAILED DESCRIPTION OF THE INVENTION

### Definitions

[0060] “Differential expression”, or “expression” as used herein, refers to both quantitative as well as qualitative differences in the genes' expression patterns depending on differential development, different genetic background of tumor cells and/or reaction to the tissue environment of the tumor. Differentially expressed genes may represent “marker genes,” and/or “target genes”. The expression pattern of a differentially expressed gene disclosed herein may be utilized as part of a prognostic or diagnostic breast cancer evaluation. Alternatively, a differentially expressed gene disclosed herein may be used in methods for identifying reagents and compounds and uses of these reagents and compounds for the treatment of breast cancer as well as methods of treatment. The differential regulation of the gene is not limited to a specific cancer cell type or clone, but rather displays the interplay of cancer cells, muscle cells, stromal cells, connective tissue cells, other epithelial cells, endothelial cells and blood vessels as well as cells of the immune system (e.g. lymphocytes, macrophages, killer cells).

[0061] “Biological activity” or “bioactivity” or “activity” or “biological function”, which are used interchangeably, herein mean an effector or antigenic function that is directly or indirectly performed by a polypeptide (whether in its native or denatured conformation), or by any fragment thereof in vivo or in vitro. Biological activities include but are not limited to binding to polypeptides, binding to other proteins or molecules, enzymatic activity, signal transduction, activity as a DNA binding protein, as a transcription regulator, ability to bind damaged DNA, etc. A bioactivity can be modulated by directly affecting the subject polypeptide. Alternatively, a bioactivity can be altered by modulating the level of the polypeptide, such as by modulating expression of the corresponding gene.

[0062] The term “marker” or “biomarker” refers a biological molecule, e.g., a nucleic acid, peptide, hormone, etc., whose presence or concentration can be detected and correlated with a known condition, such as a disease state.

[0063] The term “marker gene,” as used herein, refers to a differentially expressed gene which expression pattern may be utilized as part of predictive, prognostic or diagnostic process in malignant neoplasia or breast cancer evaluation, or which, alternatively, may be used in methods for identifying compounds useful for the treatment or prevention of malignant neoplasia and breast cancer in particular. A marker gene may also have the characteristics of a target gene.

[0064] “Target gene”, as used herein, refers to a differentially expressed gene involved in breast cancer in a manner by which modulation of the level of target gene expression or of target gene product activity may act to ameliorate symptoms of malignant neoplasia and breast cancer in particular. A target gene may also have the characteristics of a marker gene.

[0065] The term “neoplastic lesion” or “neoplastic disease” or “neoplasia” refers to a cancerous tissue this includes carcinomas, (e.g., carcinoma in situ, invasive carcinoma, metastatic carcinoma) and pre-malignant conditions, neomorphic changes independent of their histological origin (e.g. ductal, lobular, medullary, mixed origin). The term “cancer” is not limited to any stage, grade, histomorphological feature, invasiveness, agressivity or malignancie of an affected tissue or cell aggregation. In particular stage 0 breast cancer, stage I breast cancer, stage II breast cancer, stage III breast cancer, stage IV breast cancer, grade I breast cancer, grade II breast cancer, grade III breast cancer, malignant breast cancer, primary carcinomas of the breast, and all other types of cancers, malignancies and transformations associated with the breast are included. The terms “neoplastic lesion” or “neoplastic disease” or “neoplasia” or “cancer” are not limited to any tissue or cell type they also include primary, secondary or metastatic lesion of cancer patients, and also comprises lymph nodes affected by cancer cells or minimal residual disease cells either locally deposited (e.g. bone marrow, liver, kidney) or freely floating throughout the patients body.

[0066] The term “biological sample”, as used herein, refers to a sample obtained from an organism or from components (e.g., cells) of an organism. The sample may be of any biological tissue or fluid. Frequently the sample will be a “clinical sample” which is a sample derived from a patient. Such samples include, but are not limited to, sputum, blood, blood cells (e.g., white cells), tissue or fine needle biopsy samples, cell-containing body fluids, free floating nucleic acids, urine, peritoneal fluid, and pleural fluid, or cells therefrom. Biological samples may also include sections of tissues such as frozen or fixed sections taken for histological purposes. A biological sample to be analyzed is tissue material from neoplastic lesion taken by aspiration or punctuation, excision or by any other surgical method leading to biopsy or resected cellular material. Such biological sample may comprises cells obtained from a patient. The cells may be found in a breast cell “smear” collected, for example, by a nipple aspiration, ductal lavarge, fine needle biopsy or from provoked or spontaneous nipple discharge. In another embodiment, the sample is a body fluid. Such fluids include, for example, blood fluids, lymph, ascitic fluids, gynecological fluids, or urine but not limited to these fluids.

[0067] The term “therapy modality”, “therapy mode”, “regimen” or “chemo regimen” as well as “therapy regime” refers to a timely sequential or simultaneous administration of anti tumor, and/or immune stimulating, and/or blood cell proliferative agents, and/or radiation therapy, and/or hyperthermia, and/or hypothermia for cancer therapy. The administration of these can be performed in an adjuvant and/or neoadjuvant mode. The composition of such “protocol” may vary in dose of the single agent, timeframe of application and frequency of administration within a defined therapy window. Currently various combinations of various drugs and/or physical methods, and various schedules are under investigation.

[0068] By “array” or “matrix” is meant an arrangement of addressable locations or “addresses” on a device. The locations can be arranged in two dimensional arrays, three dimensional arrays, or other matrix formats. The number of locations can range from several to at least hundreds of thousands. Most importantly, each location represents a totally independent reaction site. Arrays include but are not limited to nucleic acid arrays, protein arrays and antibody arrays. A “nucleic acid array” refers to an array containing nucleic acid probes, such as oligonucleotides, polynucleotides or larger portions of genes. The nucleic acid on the array is preferably single stranded. Arrays wherein the probes are oligonucleotides are referred to as “oligonucleotide arrays” or “oligonucleotide chips.” A “microarray,” herein also refers to a “biochip” or “biological chip”, an array of regions having a density of discrete regions of at least about 100/cm², and preferably at least about 1000/cm². The regions in a microarray have typical dimensions, e.g., diameters, in the range of between about 10-250 μm, and are separated from other regions in the array by about the same distance. A “protein array” refers to an array containing polypeptide probes or protein probes which can be in native form or denatured. An “antibody array” refers to an array containing antibodies which include but are not limited to monoclonal antibodies (e.g. from a mouse), chimeric antibodies, humanized antibodies or phage antibodies and single chain antibodies as well as fragments from antibodies.

[0069] The term “agonist”, as used herein, is meant to refer to an agent that mimics or upregulates (e.g., potentiates or supplements) the bioactivity of a protein. An agonist can be a wild-type protein or derivative thereof having at least one bioactivity of the wild-type protein. An agonist can also be a compound that upregulates expression of a gene or which increases at least one bioactivity of a protein. An agonist can also be a compound which increases the interaction of a polypeptide with another molecule, e.g., a target peptide or nucleic acid.

[0070] The term “antagonist” as used herein is meant to refer to an agent that downregulates (e.g., suppresses or inhibits) at least one bioactivity of a protein. An antagonist can be a compound which inhibits or decreases the interaction between a protein and another molecule, e.g., a target peptide, a ligand or an enzyme substrate. An antagonist can also be a compound that downregulates expression of a gene or which reduces the amount of expressed protein present.

[0071] “Small molecule” as used herein, is meant to refer to a composition, which has a molecular weight of less than about 5 kD and most preferably less than about 4 kD. Small molecules can be nucleic acids, peptides, polypeptides, peptidomimetics, carbohydrates, lipids or other organic (carbon-containing) or inorganic molecules. Many pharmaceutical companies have extensive libraries of chemical and/or biological mixtures, often fungal, bacterial, or algal extracts, which can be screened with any of the assays of the invention to identify compounds that modulate a bioactivity.

[0072] The terms “modulated” or “modulation” or “regulated” or “regulation” and “differentially regulated” as used herein refer to both upregulation (i.e., activation or stimulation (e.g., by agonizing or potentiating) and down regulation [i.e., inhibition or suppression (e.g., by antagonizing, decreasing or inhibiting)].

[0073] “Transcriptional regulatory unit” refers to DNA sequences, such as initiation signals, enhancers, and promoters, which induce or control transcription of protein coding sequences with which they are operably linked. In preferred embodiments, transcription of one of the genes is under the control of a promoter sequence (or other transcriptional regulatory sequence) which controls the expression of the recombinant gene in a cell-type in which expression is intended. It will also be understood that the recombinant gene can be under the control of transcriptional regulatory sequences which are the same or which are different from those sequences which control transcription of the naturally occurring forms of the polypeptide.

[0074] The term “derivative” refers to the chemical modification of a polypeptide sequence, or a polynucleotide sequence. Chemical modifications of a polynucleotide sequence can include, for example, replacement of hydrogen by an alkyl, acyl, or amino group. A derivative polynucleotide encodes a polypeptide which retains at least one biological or immunological function of the natural molecule. A derivative polypeptide is one modified by glycosylation, pegylation, or any similar process that retains at least one biological or immunological function of the polypeptide from which it was derived.

[0075] The term “nucleotide analog” refers to oligomers or polymers being at least in one feature different from naturally occurring nucleotides, oligonucleotides or polynucleotides, but exhibiting functional features of the respective naturally occurring nucleotides (e.g. base paring, hybridization, coding information) and that can be used for said compositions. The nucleotide analogs can consist of non-naturally occurring bases or polymer backbones, examples of which are LNAs, PNAs and Morpholinos. The nucleotide analog has at least one molecule different from its naturally occurring counterpart or equivalent.

[0076] “BREAST CANCER GENES” or “BREAST CANCER GENE” as used herein refers to the polynucleotides of SEQ ID NO:1 to 165 and 472 to 491 (listed in Table 1a and 1b), as well as derivatives, fragments, analogs and homologues thereof, the polypeptides encoded thereby, (SEQ ID NO:166 to 330 and 492 to 511, see Table 1) as well as derivatives, fragments, analogs and homologues thereof and the corresponding genomic transcription units which can be derived or identified with standard techniques well known in the art using the information disclosed in Tables 1 to 5. The Genename, Reference Sequence, unique Gene-identifier, and the Locuslink ID numbers of the polynucleotide sequences of the SEQ ID NO: 1 to 65 and the polypeptides of the SEQ ID NO: 166 to 330 and 492 to 511 are shown in Table 1a and 1b, the gene description, gene function and subcellelar localization is given in Tables 4a and 4b.

[0077] The term “chromosomal region” as used herein refers to a consecutive DNA stretch on a chromosome which can be defined by cytogenetic or other genetic markers such as e.g. restriction length polymorphisms (RFLPs), single nucleotide polymorphisms (SNPs), expressed sequence tags (ESTs), sequence tagged sites (STSs), microsatellites, variable number of tandem repeats (VNTRs) and genes. Typically a chromosomal region consists of up to 2 Megabases (MB), up to 4 MB, up to 6 MB, up to 8 MB, up to 10 MB, up to 20 MB or even more MB.

[0078] The term “kit” as used herein refers to any manufacture (e.g. a diagnostic or research product) comprising at least one reagent, e.g. a probe, for specifically detecting the expression of at least one marker gene disclosed in the invention, in particular of those genes listed in Table 2, whereas the manufacture is being sold, distributed, and/or promoted as a unit for performing the methods of the present invention. The genes, primer and probes listed in Table 2 and 5 or any combination of at least two of them, regard as one single test for the purposes, methods and disclosures of this invention. Also reagents (e.g. immunoassays) to detect the presence, the stability, activity, complexity of the respective marker gene products comprising polypeptides selected from SEQ ID NO:166 to 330 and 492 to 511 regard as components of the kit. In addition, any combination of nucleic acid and protein detection as disclosed in the invention are regard as a kit.

[0079] The present invention provides polynucleotide sequences and proteins encoded thereby, as well as probes derived from the polynucleotide sequences, antibodies directed to the encoded proteins, and predictive, preventive, diagnostic, prognostic and therapeutic uses for individuals which are at risk for or which have malignant neoplasia and breast cancer in particular. The sequences disclosure herein have been found to be differentially expressed in samples from breast cancer.

[0080] The present invention is based on the identification of 185 genes that are differentially regulated (up- or down regulated) in tumor biopsies of patients with clinical evidence of breast cancer. The characterization of the co-expression of some of these genes provides newly identified roles in breast cancer. The gene names, the database accession numbers (Genename, Reference Sequence, unique Gene-identifier, and the Locuslink ID numbers) as well as the putative or known functions of the encoded proteins and their subcellular localization are given in Tables 1 to 4a and 4b. The primer sequences used for the gene amplification and hybridization probes are shown in Table 5.

[0081] The present invention relates to:
[0082] 1. A method for characterizing (preferably ex vivo) the state of a neoplastic disease in a subject, comprising
   [0083] (i) determining the pattern of expression levels of at least 6, 8, 10, 15, 20, 30, or 47 marker genes, comprised in a group of marker genes consisting of SEQ ID NO: 1 to 165 and 472 to 491, in a biological sample from said subject,
   [0084] (ii) comparing the pattern of expression levels determined in (i) with one or several reference pattern(s) of expression levels,
   [0085] (iii) characterizing the state of said neoplastic disease in said subject from the outcome of the comparison in step (ii).
[0086] 2. A method for detection, diagnosis, screening, monitoring, and/or prognosis of a neoplastic disease in a subject, (preferably ex vivo) comprising
   [0087] (i) determining the pattern of expression levels of at least 1, 2, 3, 5, 10, 15, 20, 30, or 47 marker genes, comprised in a group of marker genes consisting of SEQ ID NOs:1 to 17, 19 to 33, 35 to 50, 52 to 64, 66 to 85, 88 to 91, and 93 to 165 and 472 to 491 in biological samples from said subject,
   [0088] (ii) comparing the pattern of expression levels determined in (i) with one or several reference pattern(s) of expression levels,
   [0089] (iii) detecting, diagnosing, screening, monitoring, and/or prognosing said neoplastic disease in said subject from the outcome of the comparison in step (ii).

[0090] Determination of an expression level can comprise a quantitatification of the expression level and/or a purely qualitative determination of the expression level.

[0091] A “pattern of expression levels” of a single gene is to be understood as the expression level of said gene as determined by suitable methods.

[0092] Nucleic acid molecules, referred to with a specific SEQ ID NO, within the meaning of the invention, are to be understood as comprising also variants of said nucleic acid molecules, which can be derived from the original nucleic acid molecules by deletion, insertion or transposition of nucleotides, provided said variants still have an 80, 90, 95, or 99% sequence identity towards the original sequence. Preferrably the variants still have the same biological activity and/or function as have the original molecules.

[0093] It is obvious to the person skilled in the art that a reference to a nucleotide sequence is meant to comprise the reference to the associated protein sequence which is coded by said nucleotide sequence.

[0094] “% identity” of a first sequence towards a second sequence, within the meaning of the invention, means the % identity which is calculated as follows: First the optimal global alignment between the two sequences is determined with the CLUSTALW algorithm [Thomson J D, Higgins D G, Gibson T J. 1994. ClustalW: Improving the sensitivity of progressive multiple sequence alignment through sequence weighting, positions-specific gap penalties and weight matrix choice. Nucleic Acids Res., 22: 4673-4680], Version 1.8, applying the following command line syntax: ./clustalw-infile=./infile.txt-output=outorder=aligned-pwmatrix=gonnet-pwdnamatrix=clustalw-pwgapopen=10.0-pwgapext=0.1-matrix=gonnet-gapopen=10.0-gapext-0.05-gapdist=8-hgapresidues=GPSNDQERK-maxdiv=40. Implementations of the CLUSTAL W algorithm are readily available at numerous sites on the internet, including, e.g., http://www.ebi.ac.uk. Thereafter, the number of matches in the alignment is determined by counting the number of identical nucleotides (or amino acid residues) in aligned positions. Finally, the total number of matches is divided by the number of nucleotides (or amino acid residues) of the longer of the two sequences, and multiplied by 100 to yield the % identity of the first sequence towards the second sequence.
[0095] 3. A method of count 1 or 2, wherein said method comprises multiple determinations of a pattern of expression levels, at different points in time, thereby allowing to monitor the development of said neoplastic disease in said subject.
[0096] 4. A method of count 1, wherein said method comprises an estimation of the likelihood of success of a given mode of treatment for said neoplastic disease in said subject.
[0097] 5. A method of count 1, wherein said method comprises an assessment of whether the subject is expected to respond or whether the subject is expected not to a given mode of treatment for said neoplastic disease.

[0098] The terms “to respond” or “not to respond” are to be understood in a qualitative and/or in a quantitative fashion. “To respond” and “not to respond” is to be assessed with regard to a suitable reference responses, such as, e.g., responses shown by “responders” and “not-responders” to a certain mode of treatment or modality of treatment.
[0099] 6. A method of count 4 or 5, wherein a predictive algorithm is used.

[0100] Predictive algorithms, which are well known to a person skilled in the art of data analysis, are to be understood as being any kind of predictive algorithm known in the art. Preferred examples of such algorithms are, e.g., the SVM algorithm disclosed in Example 4.
[0101] 7. A method of count 6, wherein the predictive algorithm is a Support Vector Machine.

[0102] Support Vector Machines are algorithms, well known to the person skilled in the art of data analysis. A Support Vector Machine algorithm is disclosed in Example 4.
[0103] 8. A method of any of counts 4 to 7, wherein said given mode of treatment
   [0104] (i) acts on cell proliferation, and/or
   [0105] (ii) acts on cell survival, and/or
   [0106] (iii) acts on cell motility, and/or
   [0107] (iv) is an anthracycline based mode of treatment, and/or
   [0108] (v) comprises administration of epirubicin and/or cyclophoshamid.
[0109] 9. A method of treatment for a subject afflicted with a neoplastic disease, comprising
   [0110] (i) identifying a promising mode of treatment with the method of count 4 or 5,
   [0111] (ii) treating said neoplastic disease in said patient by the mode of treatment identified in step (i).
[0112] 10. A method of screening for subjects afflicted with a neoplastic disease, wherein the method of count 1 or 2 is applied to a plurality of subjects.
[0113] 11. A method of screening for substances and/or therapy modalities having curative effect on a neoplastic disease comprising
   [0114] (i) obtaining a biological sample from a subject afflicted with said neoplastic disease,
   [0115] (ii) assessing, from said biological sample, using the method of count 4 or 5, whether said subject is expected to respond to a given mode of treatment for said neoplastic disease,
   [0116] (iii) if said subject is expected to respond to said given mode of treatment, incubating said biological sample with said substance under said therapy modalities,
   [0117] (iv) observing changes in said biological sample triggered by said test substance under said therapy modalities,
   [0118] (v) selecting or rejecting said test substance and/or said therapy modalities, based on the observation of changes in said biological sample under (iv).

[0119] Selecting specific biological samples of, e.g., good responders to a given therapy can help to identify novel substances and/or therapy modalities for the treatment of said specific neoplastic disease.
[0120] 12. A method of screening for compounds having curative effect on a neoplastic disease comprising
   [0121] (i) incubating biological samples or extracts of these with a test substance,
   [0122] (ii) determining the pattern of expression levels of at least 1, 2, 3, 5, 10, 15, 20, 30, or 47 marker genes, comprised in a group of marker genes consisting of SEQ ID NO:1 to 17, 19 to 33, 35 to 50, 52 to 64, 66 to 85, 88 to 91, and 93 to 165 and 472 to 491 in said biological sample,
   [0123] (iii) comparing the pattern of expression levels determined in (ii) with one or several reference pattern(s),
   [0124] (iv) selecting or rejecting said test substance, based on the comparison performed under (iii).
[0125] 13. A method of any of counts 1 to 12 wherein said marker genes are comprised in a group of marker genes listed in Table 2.

[0126] Marker genes listed in Table 2 are shown to be particularly informative with respect to assessing the probability of success of a certain mode of treatment for a given neoplastic disease. Marker genes of Table 2 are preferred marker genes, according to the invention.
[0127] 14. A method of any of counts 1 to 13, wherein the expression level is determined
   [0128] (i) with a hybridization based method, or
   [0129] (ii) with a hybridization based method utilizing arrayed probes, or
   [0130] (iii) with a hybridization based method utilizing individually labeled probes, or
   [0131] (iv) by real time real time PCR, or
   [0132] (v) by assessing the expression of polypeptides, proteins or derivatives thereof, or
   [0133] (vi) by assessing the amount of polypeptides, proteins or derivatives thereof.
[0134] 15. A method of any of counts 1 to 14, wherein the neoplastic disease is breast cancer.

[0135] The methods of the invention are preferably performed ex vivo. More preferably, methods of the invention are performed ex vivo on samples that are already available or can be obtained without intervention of a physician or other medically trained personnel.
[0136] 16. A kit comprising at least 6, 8, 10, 15, 20, 30, or 47 primer pairs and probes suitable for marker genes comprised in a group of marker genes consisting of
   [0137] (i) SEQ ID NO:1 to SEQ ID NO:165, or
   [0138] (ii) the marker genes listed in Table 2.
[0139] 17. A kit comprising at least 6, 8, 10, 15, 20, 30, or 47 sets of individually labeled probes, each having a sequence comprised in a group of sequences consisting of SEQ ID NO:331 to SEQ ID NO:471.
[0140] 18. A kit comprising at least 6, 8, 10, 15, 20, 30, or 47 sets of arrayed probes, each having a sequence comprised in a group of sequences consisting of SEQ ID NO:331 to SEQ ID NO:471.
   Biological Relevance of the Genes which are Part of the Invention

[0141] Some of the genes listed in Table 1a and 1b represent biological, cellular processes and are characterized by similar regulation of genes. By the way of illustration but limited to the following examples a few characteristic genes from Table 1 are described in later by greater detail:

### MAD2L1

[0142] The initiation of chromosome segregation at anaphase is linked by the spindle assembly checkpoint to the completion of chromosome-microtubule attachment during metaphase. To determine the function of the Mad2 protein during normal cell division, knock out experiments in mice were performed. These cells were unable to arrest in response to spindle disruption. At embryonic day 6.5, the cells of the epiblast began rapid cell division, and the absence of a checkpoint resulted in widespread chromosome missegregation and apoptosis. In contrast, the postmitotic trophoblast giant cells survived without Mad2. Thus, the spindle assembly checkpoint is required for accurate chromosome segregation in mitotic mouse cells and for embryonic viability, even in the absence of spindle damage.

[0143] Meiosis I nondisjunction in spindle checkpoint mutants could be prevented by delaying the onset of anaphase. In a recombinant-defective mutant, the checkpoint delayed the biochemical events of anaphase I, suggesting that chromosomes that are attached to microtubules but are not under tension can activate the spindle checkpoint. Spindle checkpoint mutants reduced the accuracy of chromosome segregation in meiosis I much more than that in meiosis II, suggesting that checkpoint defects may contribute to Down syndrome and possibly to the “chaotic” polyploidy observed in cancer.

### IGFBP4

[0144] Seven structurally distinct insulin-like growth factor binding proteins have been isolated and their cDNAs cloned: IGFBP1, IGFBP2, IGFBP3, IGFBP4, IGFBP5, IGFBP6, and IGFBP7. The proteins display strong sequence homologies, suggesting that they are encoded by a closely related family of genes. The IGFBPs contain 3 structurally distinct domains each comprising approximately one-third of the molecule. The N-terminal domain 1 and the C-terminal domain 3 of the 6 human IGFBPs show moderate to high levels of sequence identity including 12 and 6 invariant cysteine residues in domains 1 and 3, respectively (IGFBP6 contains 10 cysteine residues in domain 1), and are thought to be the IGF binding domains. Domain 2 is defined primarily by a lack of sequence identity among the 6 IGFBPs and by a lack of cysteine residues, though it does contain 2 cysteines in IGFBP4. Domain 3 is homologous to the thyroglobulin type I repeat unit. Studies suggested that the primary effect of the proteins is the attenuation of IGF activity and suggested that they contribute to the control of IGF-mediated cell growth and metabolism

### DDB2

[0145] In human cells, efficient global genomic repair of DNA damage induced by ultraviolet radiation requires the p53 tumor suppressor. The p48 gene is required for expression of an ultraviolet radiation-damaged DNA-binding activity and is disrupted by mutations in the subset of xeroderma pigmentosum group E cells that lack this activity, DDB-negative XPE. p48 mRNA levels are strongly depend on basal p53 expression and increase further after DNA damage in a p53-dependent manner. Furthermore, like p53−/−cells, xeroderma pigmentosum group E cells are deficient in global genomic repair. These results identified p48 as a link between p53 and the nucleotide excision-repair apparatus.

[0146] UV-damaged DNA-binding activity (UV-DDB) is deficient in cell lines and primary tissues from rodents. Transfection of p48 conferred UV-DDB to hamster cells and enhanced removal of cyclobutane pyrimidine dimers (CPDs) from genomic DNA and from the nontranscribed strand of an expressed gene. Expression of p48 suppressed UV-induced mutations arising from the nontranscribed strand but had no effect on cellular UV sensitivity. The results defined the role of p48 in DNA repair, demonstrated the importance of CPDs in mutagenesis, and suggested how rodent models can be improved to better reflect cancer susceptibility in humans.

### HSPA2

[0147] Several heat-shock protein genes are located in the major histocompatibility complex on chromosome 6, e.g., HSPA1. However HSPA2 is located on 14q22-q24. isolated The clone for HSPA2 is characterized by a single open reading frame of 1,917 basepairs that encodes a 639-amino acid protein with a predicted molecular weight of 70,030 Da. Analysis of the sequence indicated that HSPA2 is the human homolog of the murine Hsp70-2 gene with 91.7% identity in the nucleotide coding sequence and 98.2% in the corresponding amino acid sequence. HSPA2 has less amino acid homology to the other members of the human HSP70 gene family. HSPA2 is constitutively expressed in most tissues, with very high levels in testis and skeletal muscle. HSPA2 is expressed abundantly in muscle, heart, esophagus, and brain, and to a lesser extent in testis. A female homozygous knockout mice for Hsp70-2 undergo normal meiosis and is fertile. In contrast, homozygous male knockout mice lacked postmeiotic spermatids and mature sperm and were infertile. Hsp70-2 is normally associated with synaptonemal complexes in the nuclei of meiotic spermatocytes. In the male knockouts, these structures were abnormal by late prophase. One can observe also a large increase in spermatocyte apoptosis.

### Polynucleotides

[0148] A “BREAST CANCER GENE” polynucleotide can be single- or double-stranded and comprises a coding sequence or the complement of a coding sequence for a “BREAST CANCER GENE” polypeptide. Degenerate nucleotide sequences encoding human “BREAST CANCER GENE” polypeptides, as well as homologous nucleotide sequences which are at least about 50, 55, 60, 65, 70, preferably about 75, 90, 96, or 98% identical to the nucleotide sequences of SEQ ID NO: 1 to 165 and 472 to 491 also are “BREAST CANCER GENE” polynucleotides. Percent sequence identity between the sequences of two polynucleotides is determined using computer programs such as ALIGN which employ the FASTA algorithm, using an affine gap search with a gap open penalty of −12 and a gap extension penalty of −2. Complementary DNA (cDNA) molecules, species homologues, and variants of “BREAST CANCER GENE” polynucleotides which encode biologically active “BREAST CANCER GENE” polypeptides also are “BREAST CANCER GENE” polynucleotides.

### Preparation of Polynucleotides

[0149] A naturally occurring “BREAST CANCER GENE” polynucleotide can be isolated free of other cellular components such as membrane components, proteins, and lipids. Polynucleotides can be made by a cell and isolated using standard nucleic acid purification techniques, or synthesized using an amplification technique, such as the polymerase chain reaction (PCR), or by using an automatic synthesizer. Methods for isolating polynucleotides are routine and are known in the art. Any such technique for obtaining a polynucleotide can be used to obtain isolated “BREAST CANCER GENE” polynucleotides. For example, restriction enzymes and probes can be used to isolate polynucleotide fragments which comprises “BREAST CANCER GENE” nucleotide sequences. Isolated polynucleotides are in preparations which are free or at least 70, 80, or 90% free of other molecules.

[0150] “BREAST CANCER GENE” cDNA molecules can be made with standard molecular biology techniques, using “BREAST CANCER GENE” mRNA as a template. Any RNA isolation technique which does not select against the isolation of mRNA may be utilized for the purification of such RNA samples. See, for example, Sambrook et al., 1989, (6); and Ausubel, F. M. et al., 1989, (7), both of which are incorporated herein by reference in their entirety. Additionally, large numbers of tissue samples may readily be processed using techniques well known to those of skill in the art, such as, for example, the single-step RNA isolation process of Chomczynski, P. (1989, U.S. Pat. No. 4,843,155), which is incorporated herein by reference in its entirety.

[0151] “BREAST CANCER GENE” cDNA molecules can thereafter be replicated using molecular biology techniques known in the art and disclosed in manuals such as Sambrook et al., 1989, (6). An amplification technique, such as PCR, can be used to obtain additional copies of polynucleotides of the invention, using either human genomic DNA or cDNA as a template.

[0152] Alternatively, synthetic chemistry techniques can be used to synthesizes “BREAST CANCER GENE” polynucleotides. The degeneracy of the genetic code allows alternate nucleotide sequences to be synthesized which will encode a “BREAST CANCER GENE” polypeptide or a biologically active variant thereof.

### Identification of Differential Expression

[0153] Transcripts within the collected RNA samples which represent RNA produced by differentially expressed genes may be identified by utilizing a variety of methods which are ell known to those of skill in the art. For example, differential screening [Tedder, T. F. et al., 1988, (8)], subtractive hybridization [Hedrick, S. M. et al., 1984, (9); Lee, S. W. et al., 1984, (10)], and, preferably, differential display (Liang, P., and Pardee, A. B., 1993, U.S. Pat. No. 5,262,311, which is incorporated herein by reference in its entirety), may be utilized to identify polynucleotide sequences derived from genes that are differentially expressed.

[0154] Differential screening involves the duplicate screening of a cDNA library in which one copy of the library is screened with a total cell cDNA probe corresponding to the mRNA population of one cell type while a duplicate copy of the cDNA library is screened with a total cDNA probe corresponding to the mRNA population of a second cell type. For example, one cDNA probe may correspond to a total cell cDNA probe of a cell type derived from a control subject, while the second cDNA probe may correspond to a total cell cDNA probe of the same cell type derived from an experimental subject. Those clones which hybridize to one probe but not to the other potentially represent clones derived from genes differentially expressed in the cell type of interest in control versus experimental subjects.

[0155] Subtractive hybridization techniques generally involve the isolation of mRNA taken from two different sources, e.g., control and experimental tissue, the hybridization of the mRNA or single-stranded cDNA reverse-transcribed from the isolated mRNA, and the removal of all hybridized, and therefore double-stranded, sequences. The remaining non-hybridized, single-stranded cDNAs, potentially represent clones derived from genes that are differentially expressed in the two mRNA sources. Such single-stranded cDNAs are then used as the starting material for the construction of a library comprising clones derived from differentially expressed genes.

[0156] The differential display technique describes a procedure, utilizing the well known polymerase chain reaction (PCR; the experimental embodiment set forth in Mullis, K. B., 1987, U.S. Pat. No. 4,683,202) which allows for the identification of sequences derived from genes which are differentially expressed. First, isolated RNA is reverse-transcribed into single-stranded cDNA, utilizing standard techniques which are well known to those of skill in the art. Primers for the reverse transcriptase reaction may include, but are not limited to, oligo dT-containing primers, preferably of the reverse primer type of oligonucleotide described below. Next, this technique uses pairs of PCR primers, as described below, which allow for the amplification of clones representing a random subset of the RNA transcripts present within any given cell. Utilizing different pairs of primers allows each of the mRNA transcripts present in a cell to be amplified. Among such amplified transcripts may be identified those which have been produced from differentially expressed genes.

[0157] The reverse oligonucleotide primer of the primer pairs may contain an oligo dT stretch of nucleotides, preferably eleven nucleotides long, at its 5′ end, which hybridizes to the poly(A) tail of mRNA or to the complement of a cDNA reverse transcribed from an mRNA poly(A) tail. Second, in order to increase the specificity of the reverse primer, the primer may contain one or more, preferably two, additional nucleotides at its 3′ end. Because, statistically, only a subset of the mRNA derived sequences present in the sample of interest will hybridize to such primers, the additional nucleotides allow the primers to amplify only a subset of the mRNA derived sequences present in the sample of interest. This is preferred in that it allows more accurate and complete visualization and characterization of each of the bands representing amplified sequences.

[0158] The forward primer may contain a nucleotide sequence expected, statistically, to have the ability to hybridize to cDNA sequences derived from the tissues of interest. The nucleotide sequence may be an arbitrary one, and the length of the forward oligonucleotide primer may range from about 9 to about 13 nucleotides, with about 10 nucleotides being preferred. Arbitrary primer sequences cause the lengths of the amplified partial cDNAs produced to be variable, thus allowing different clones to be separated by using standard denaturing sequencing gel electrophoresis. PCR reaction conditions should be chosen which optimize amplified product yield and specificity, and, additionally, produce amplified products of lengths which may be resolved utilizing standard gel electrophoresis techniques. Such reaction conditions are well known to those of skill in the art, and important reaction parameters include, for example, length and nucleotide sequence of oligonucleotide primers as discussed above, and annealing and elongation step temperatures and reaction times. The pattern of clones resulting from the reverse transcription and amplification of the mRNA of two different cell types is displayed via sequencing gel electrophoresis and compared. Differences in the two banding patterns indicate potentially differentially expressed genes.

[0159] When screening for full-length cDNAs, it is preferable to use libraries that have been size-selected to include larger cDNAs. Randomly-primed libraries are preferable, in that they will contain more sequences which contain the 5′ regions of genes. Use of a randomly primed library may be especially preferable for situations in which an oligo d(T) library does not yield a full-length cDNA. Genomic libraries can be useful for extension of sequence into 5′ nontranscribed regulatory regions.

[0160] Commercially available capillary electrophoresis systems can be used to analyze the size or confirm the nucleotide sequence of PCR or sequencing products. For example, capillary sequencing can employ flowable polymers for electrophoretic separation, four different fluorescent dyes (one for each nucleotide) which are laser activated, and detection of the emitted wavelengths by a charge coupled device camera. Output/light intensity can be converted to electrical signal using appropriate software (e.g. GENOTYPER and Sequence NAVIGATOR, Perkin Elmer; ABI), and the entire process from loading of samples to computer analysis and electronic data display can be computer controlled. Capillary electrophoresis is especially preferable for the sequencing of small pieces of DNA which might be present in limited amounts in a particular sample.

[0161] Once potentially differentially expressed gene sequences have been identified via bulk techniques such as, for example, those described above, the differential expression of such putatively differentially expressed genes should be corroborated. Corroboration may be accomplished via, for example, such well known techniques as Northern analysis and/or RT-PCR. Upon corroboration, the differentially expressed genes may be further characterized, and may be identified as target and/or marker genes, as discussed, below.

[0162] Also, amplified sequences of differentially expressed genes obtained through, for example, differential display may be used to isolate full length clones of the corresponding gene. The full length coding portion of the gene may readily be isolated, without undue experimentation, by molecular biological techniques well known in the art. For example, the isolated differentially expressed amplified fragment may be labeled and used to screen a cDNA library. Alternatively, the labeled fragment may be used to screen a genomic library.

[0163] An analysis of the tissue distribution of the mRNA produced by the identified genes may be conducted, utilizing standard techniques well known to those of skill in the art. Such techniques may include, for example, Northern analyses and RT-PCR. Such analyses provide information as to whether the identified genes are expressed in tissues expected to contribute to breast cancer. Such analyses may also provide quantitative information regarding steady state mRNA regulation, yielding data concerning which of the identified genes exhibits a high level of regulation in, preferably, tissues which may be expected to contribute to breast cancer.

[0164] Such analyses may also be performed on an isolated cell population of a particular cell type derived from a given tissue. Additionally, standard in situ hybridization techniques may be utilized to provide information regarding which cells within a given tissue express the identified gene. Such analyses may provide information regarding the biological function of an identified gene relative to breast cancer in instances wherein only a subset of the cells within the tissue is thought to be relevant to breast cancer.

### Extending Polynucleotides

[0165] In one embodiment of such a procedure for the identification and cloning of full length gene sequences, RNA may be isolated, following standard procedures, from an appropriate tissue or cellular source. A reverse transcription reaction may then be performed on the RNA using an oligonucleotide primer complimentary to the mRNA that corresponds to the amplified fragment, for the priming of first strand synthesis. Because the primer is anti-parallel to the mRNA, extension will proceed toward the 5′ end of the mRNA. The resulting RNA hybrid may then be “tailed” with guanines using a standard terminal transferase reaction, the hybrid may be digested with RNase H, and second strand synthesis may then be primed with a poly-C primer. Using the two primers, the 5′ portion of the gene is amplified using PCR. Sequences obtained may then be isolated and recombined with previously isolated sequences to generate a full-length cDNA of the differentially expressed genes of the invention. For a review of cloning strategies and recombinant DNA techniques, see e.g., Sambrook et al., (6); and Ausubel et al., (7).

[0166] Various PCR-based methods can be used to extend the polynucleotide sequences disclosed herein to detect upstream sequences such as promoters and regulatory elements. For example, restriction site PCR uses universal primers to retrieve unknown sequence adjacent to a known locus [Sarkar, 1993, (11)]. Genomic DNA is first amplified in the presence of a primer to a linker sequence and a primer specific to the known region. The amplified sequences are then subjected to a second round of PCR with the same linker primer and another specific primer internal to the first one. Products of each round of PCR are transcribed with an appropriate RNA polymerase and sequenced using reverse transcriptase.

[0167] Inverse PCR also can be used to amplify or extend sequences using divergent primers based on a known region [Triglia et al., 1988, (12)]. Primers can be designed using commercially available software, such as OLIGO 4.06 Primer Analysis software (National Biosciences Inc., Plymouth, Minn.), to be e.g. 2230 nucleotides in length, to have a GC content of 50% or more, and to anneal to the target sequence at temperatures about 68-72° C. The method uses several restriction enzymes to generate a suitable fragment in the known region of a gene. The fragment is then circularized by intramolecular ligation and used as a PCR template.

[0168] Another method which can be used is capture PCR, which involves PCR amplification of DNA fragments adjacent to a known sequence in human and yeast artificial chromosome DNA [Lagerstrom et al., 1991, (13))]. In this method, multiple restriction enzyme digestions and ligations also can be used to place an engineered double-stranded sequence into an unknown fragment of the DNA molecule before performing PCR.

[0169] Additionally, PCR, nested primers, and PROMOTERFINDER libraries (CLONTECH, Palo Alto, Calif.) can be used to walk genomic DNA (CLONTECH, Palo Alto, Calif.). This process avoids the need to screen libraries and is useful in finding intron/exon junctions.

[0170] The sequences of the identified genes may be used, utilizing standard techniques, to place the genes onto genetic maps, e.g., mouse [Copeland & Jenkins, 1991, (14)] and human genetic maps [Cohen, et al., 1993, (15)]. Such mapping information may yield information regarding the genes' importance to human disease by, for example, identifying genes which map near genetic regions to which known genetic breast cancer tendencies map.

### Identification of Polynucleotide Variants and Homologues or Splice Variants

[0171] Variants and homologues of the “BREAST CANCER GENE” polynucleotides described above also are “BREAST CANCER GENE” polynucleotides. Typically, homologous “BREAST CANCER GENE” polynucleotide sequences can be identified by hybridization of candidate polynucleotides to known “BREAST CANCER GENE” polynucleotides under stringent conditions, as is known in the art. For example, using the following wash conditions: 2×SSC (0.3 M NaCl, 0.03 M sodium citrate, pH 7.0), 0.1% SDS, room temperature twice, 30 minutes each; then 2×SSC, 0.1% SDS, 50 EC once, 30 minutes; then 2×SSC, room temperature twice, 10 minutes each homologous sequences can be identified which contain at most about 25-30% basepair mismatches. More preferably, homologous polynucleotide strands contain 15-25% basepair mismatches, even more preferably 5-15% basepair mismatches.

[0172] Species homologues of the “BREAST CANCER GENE” polynucleotides disclosed herein also can be identified by making suitable probes or primers and screening cDNA expression libraries from other species, such as mice, monkeys, or yeast. Human variants of “BREAST CANCER GENE” polynucleotides can be identified, for example, by screening human cDNA expression libraries. It is well known that the Tₘ of a double-stranded DNA decreases by 1-1.5° C. with every 1% decrease in homology [Bonner et al., 1973, (16)]. Variants of human “BREAST CANCER GENE” polynucleotides or “BREAST CANCER GENE” polynucleotides of other species can therefore be identified by hybridizing a putative homologous “BREAST CANCER GENE” polynucleotide with a polynucleotide having a nucleotide sequence of one of the sequences of the SEQ ID NO: 1 to 165 and 472 to 491 or the complement thereof to form a test hybrid. The melting temperature of the test hybrid is compared with the melting temperature of a hybrid comprising polynucleotides having perfectly complementary nucleotide sequences, and the number or percent of basepair mismatches within the test hybrid is calculated.

[0173] Nucleotide sequences which hybridize to “BREAST CANCER GENE” polynucleotides or their complements following stringent hybridization and/or wash conditions also are “BREAST CANCER GENE” polynucleotides. Stringent wash conditions are well known and understood in the art and are disclosed, for example, in Sambrook et al., (6). Typically, for stringent hybridization conditions a combination of temperature and salt concentration should be chosen that is approximately 12 to 20° C. below the calculated Tₘ of the hybrid under study. The Tₘ of a hybrid between a “BREAST CANCER GENE” polynucleotide having a nucleotide sequence of one of the sequences of the SEQ ID NO: 1 to 165 and 472 to 491 or the complement thereof and a polynucleotide sequence which is at least about 50, preferably about 75, 90, 96, or 98% identical to one of those nucleotide sequences can be calculated, for example, using the equation below [Bolton and McCarthy, 1962, (17):

Tₘ=81.5° C.−16.6(log₁₀[Na⁺])+0.41(% G+C)−0.63(% formamide)−600/l),
[0174] where l=the length of the hybrid in basepairs.

[0175] Stringent wash conditions include, for example, 4×SSC at 65° C., or 50% formamide, 4×SSC at 28° C., or 0.5×SSC, 0.1% SDS at 65° C. Highly stringent wash conditions include, for example, 0.2×SSC at 65° C.

[0176] The biological function of the identified genes may be more directly assessed by utilizing relevant in vivo and in vitro systems. In vivo systems may include, but are not limited to, animal systems which naturally exhibit breast cancer predisposition, or ones which have been engineered to exhibit such symptoms, including but not limited to oncogene overexpression (e.g. HER2/neu, ras, raf, or EGFR) malignant neoplasia mouse.

[0177] Splice variants derived from the same genomic region, encoded by the same pre mRNA can be identified by hybridization conditions described above for homology search. The specific characteristics of variant proteins encoded by splice variants of the same pre transcript may differ and can also be assayed as disclosed. A “BREAST CANCER GENE” polynucleotide having a nucleotide sequence of one of the sequences of the SEQ ID NO: 1 to 165 and 472 to 491 or the complement thereof may therefor differ in parts of the entire sequence. The prediction of splicing events and the identification of the utilized acceptor and donor sites within the pre mRNA can be computed (e.g. Software Package GRAIL or GenomeSCAN) and verified by PCR method by those with skill in the art.

### Antisense Oligonucleotides

[0178] Antisense oligonucleotides are nucleotide sequences which are complementary to a specific DNA or RNA sequence. Once introduced into a cell, the complementary nucleotides combine with natural sequences produced by the cell to form complexes and block either transcription or translation. Preferably, an antisense oligonucleotide is at least 6 nucleotides in length, but can be at least 7, 8, 10, 12, 15, 20, 25, 30, 35, 40, 45, or 50 or more nucleotides long. Longer sequences also can be used. Antisense oligonucleotide molecules can be provided in a DNA construct and introduced into a cell as described above to alter the level of “BREAST CANCER GENE” gene products in the cell.

[0179] Antisense oligonucleotides can be deoxyribonucleotides, ribonucleotides, peptide nucleic acids (PNAs; described in U.S. Pat. No. 5,714,331), locked nucleic acids (LNAs; described in WO 99/12826), or a combination of them. Oligonucleotides can be synthesized manually or by an automated synthesizer, by covalently linking the 5′ end of one nucleotide with the 3′ end of another nucleotide with non-phosphodiester internucleotide linkages such alkylphosphonates, phosphorothioates, phosphorodithioates, alkylphosphonothioates, alkylphosphonates, phosphoramidates, phosphate esters, carbamates, acetamidate, carboxymethyl esters, carbonates, and phosphate triesters [Brown, 1994, (55); Sonveaux, 1994, (56) and Uhlmann et al., 1990, (57)].

[0180] Modifications of “BREAST CANCER GENE” expression can be obtained by designing antisense oligonucleotides which will form duplexes to the control, 5′, or regulatory regions of the “BREAST CANCER GENE”. Oligonucleotides derived from the transcription initiation site, e.g., between positions 10 and +10 from the start site, are preferred. Similarly, inhibition can be achieved using “triple helix” base-pairing methodology. Triple helix pairing is useful because it causes inhibition of the ability of the double helix to open sufficiently for the binding of polymerases, transcription factors, or chaperons. Therapeutic advances using triplex DNA have been described in the literature [Gee et al., 1994, (58)]. An antisense oligonucleotide also can be designed to block translation of mRNA by preventing the transcript from binding to ribosomes.

[0181] Precise complementarity is not required for successful complex formation between an antisense oligonucleotide and the complementary sequence of a “BREAST CANCER GENE” polynucleotide. Antisense oligonucleotides which comprise, for example, 2, 3, 4, or 5 or more stretches of contiguous nucleotides which are precisely complementary to a “BREAST CANCER GENE” polynucleotide, each separated by a stretch of contiguous nucleotides which are not complementary to adjacent “BREAST CANCER GENE” nucleotides, can provide sufficient targeting specificity for “BREAST CANCER GENE” mRNA. Preferably, each stretch of complementary contiguous nucleotides is at least 4, 5, 6, 7, or 8 or more nucleotides in length. Non-complementary intervening sequences are preferably 1, 2, 3, or 4 nucleotides in length. One skilled in the art can easily use the calculated melting point of an antisense-sense pair to determine the degree of mismatching which will be tolerated between a particular antisense oligonucleotide and a particular “BREAST CANCER GENE” polynucleotide sequence.

[0182] Antisense oligonucleotides can be modified without affecting their ability to hybridize to a “BREAST CANCER GENE” polynucleotide. These modifications can be internal or at one or both ends of the antisense molecule. For example, internucleoside phosphate linkages can be modified by adding cholesteryl or diamine moieties with varying numbers of carbon residues between the amino groups and terminal ribose. Modified bases and/or sugars, such as arabinose instead of ribose, or a 3′, 5′ substituted oligonucleotide in which the 3′ hydroxyl group or the 5′ phosphate group are substituted, also can be employed in a modified antisense oligonucleotide. These modified oligonucleotides can be prepared by methods well known in the art [Agrawal et al., 1992, (59); Uhlmann et al., 1987, (57) and Uhlmann et al., 2000 (60)].

### Ribozymes

[0183] Ribozymes are RNA molecules with catalytic activity [Cech, 1987, (61); Cech, 1990, (62) and Couture & Stinchcomb, 1996, (63)]. Ribozymes can be used to inhibit gene function by cleaving an RNA sequence, as is known in the art (e.g., Haseloff et al., U.S. Pat. No. 5,641,673). The mechanism of ribozyme action involves sequence-specific hybridization of the ribozyme molecule to complementary target RNA, followed by endonucleolytic cleavage. Examples include engineered hammerhead motif ribozyme molecules that can specifically and efficiently catalyze endonucleolytic cleavage of specific nucleotide sequences.

[0184] The transcribed sequence of a “BREAST CANCER GENE” can be used to generate ribozymes which will specifically bind to mRNA transcribed from a “BREAST CANCER GENE” genomic locus. Methods of designing and constructing ribozymes which can cleave other RNA molecules in trans in a highly sequence specific manner have been developed and described in the art [Haseloff et al., 1988, (64)]. For example, the cleavage activity of ribozymes can be targeted to specific RNAs by engineering a discrete “hybridization” region into the ribozyme. The hybridization region contains a sequence complementary to the target RNA and thus specifically hybridizes with the target [see, for example, Gerlach et al., EP 0 321201].

[0185] Specific ribozyme cleavage sites within a “BREAST CANCER GENE” RNA target can be identified by scanning the target molecule for ribozyme cleavage sites which include the following sequences: GUA, GUU, and GUC. Once identified, short RNA sequences of between 15 and 20 ribonucleotides corresponding to the region of the target RNA containing the cleavage site can be evaluated for secondary structural features which may render the target inoperable. Suitability of candidate “BREAST CANCER GENE” RNA targets also can be evaluated by testing accessibility to hybridization with complementary oligonucleotides using ribonuclease protection assays. Longer complementary sequences can be used to increase the affinity of the hybridization sequence for the target. The hybridizing and cleavage regions of the ribozyme can be integrally related such that upon hybridizing to the target RNA through the complementary regions, the catalytic region of the ribozyme can cleave the target.

[0186] Ribozymes can be introduced into cells as part of a DNA construct. Mechanical methods, such as microinjection, liposome-mediated transfection, electroporation, or calcium phosphate precipitation, can be used to introduce a ribozyme-containing DNA construct into cells in which it is desired to decrease “BREAST CANCER GENE” expression. Alternatively, if it is desired that the cells stably retain the DNA construct, the construct can be supplied on a plasmid and maintained as a separate element or integrated into the genome of the cells, as is known in the art. A ribozyme-encoding DNA construct can include transcriptional regulatory elements, such as a promoter element, an enhancer or UAS element, and a transcriptional terminator signal, for controlling transcription of ribozymes in the cells.

[0187] As taught in Haseloff et al., U.S. Pat. No. 5,641,673, ribozymes can be engineered so that ribozyme expression will occur in response to factors which induce expression of a target gene. Ribozymes also can be engineered to provide an additional level of regulation, so that destruction of mRNA occurs only when both a ribozyme and a target gene are induced in the cells.

### Polypeptides

[0188] “BREAST CANCER GENE” polypeptides according to the invention comprise an polypeptide selected from SEQ ID NO: 166 to 330 and 492 to 511 or encoded by any of the polynucleotide sequences of the SEQ ID NO: 1 to 165 and 472 to 491 or derivatives, fragments, analogues and homologues thereof. A BREAST CANCER GENE” polypeptide of the invention therefore can be a portion, a full-length, or a fusion protein comprising all or a portion of a “BREAST CANCER GENE” polypeptide.

### Protein Purification

[0189] “BREAST CANCER GENE” polypeptides can be purified from any cell which expresses the responding protein, including host cells which have been transfected with “BREAST CANCER GENE” expression constructs. A purified “BREAST CANCER GENE” polypeptide is separated from other compounds which are normally associate with the “BREAST CANCER GENE” polypeptide in the cell, such as certain proteins, carbohydrates, or lipids, using methods well-known in the art. Such methods include, but are not limited to, size exclusion chromatography, ammonium sulfate fractionation, ion exchange chromatography, affinity chromatography, and preparative gel electrophoresis. A preparation of purified ,“BREAST CANCER GENE” polypeptides is at least 80% pure; preferably, the preparations are 90%, 95%, or 99% pure. Purity of the preparations can be assessed by any means known in the art, such as SDS-polyacrylamide gel electrophoresis.

### Obtaining Polypeptides

[0190] “BREAST CANCER GENE” polypeptides can be obtained, for example, by purification from human cells, by expression of “BREAST CANCER GENE” polynucleotides, or by direct chemical synthesis.

### Biologically Active Variants

[0191] “BREAST CANCER GENE” polypeptide variants which are biologically active, i.e., retain an “BREAST CANCER GENE” activity, can be also regarded as “BREAST CANCER GENE” polypeptides. Preferably, naturally or non-naturally occurring “BREAST CANCER GENE” polypeptide variants have amino acid sequences which are at least about 60, 65, or 70, preferably about 75, 80, 85, 90, 92, 94, 96, or 98% identical to any of the amino acid sequences of the polypeptides of SEQ ID NO: 166 to 330 and 492 to 511 or the polypeptides encoded by any of the polynucleotides of SEQ ID NO: 1 to 165 and 472 to 491 or a fragment thereof. Percent identity between a putative “BREAST CANCER GENE” polypeptide variant and of the polypeptides of SEQ ID NO: 166 to 330 and 492 to 511 polypeptides encoded by any of the polynucleotides of SEQ ID NO: 1 to 165 and 472 to 491 or a fragment thereof is determined by conventional methods. [See, for example, Altschul et al., 1986, (19) and Henikoff & Henikoff, 1992, (20)]. Briefly, two amino acid sequences are aligned to optimize the alignment scores using a gap opening penalty of 10, a gap extension penalty of 1, and the “BLOSUM62” scoring matrix of Henikoff & Henikoff, 1992 (20).

[0192] Those skilled in the art appreciate that there are many established algorithms available to align two amino acid sequences. The “FASTA” similarity search algorithm of Pearson & Lipman is a suitable protein alignment method for examining the level of identity shared by an amino acid sequence disclosed herein and the amino acid sequence of a putative variant [Pearson & Lipman, 1988, (21), and Pearson, 1990, (22)]. Briefly, FASTA first characterizes sequence similarity by identifying regions shared by the query sequence (e.g., SEQ ID NO: 1 to 165 and 472 to 491) and a test sequence that have either the highest density of identities (if the ktup variable is 1) or pairs of identities (if ktup=2), without considering conservative amino acid substitutions, insertions, or deletions. The ten regions with the highest density of identities are then rescored by comparing the similarity of all paired amino acids using an amino acid substitution matrix, and the ends of the regions are “trimmed” to include only those residues that contribute to the highest score. If there are several regions with scores greater than the “cutoff” value (calculated by a predetermined formula based upon the length of the sequence the ktup value), then the trimmed initial regions are examined to determine whether the regions can be joined to form an approximate alignment with gaps. Finally, the highest scoring regions of the two amino acid sequences are aligned using a modification of the Needleman-Wunsch-Sellers algorithm [Needleman & Wunsch, 1970, (23), and Sellers, 1974, (24)], which allows for amino acid insertions and deletions. Preferred parameters for FASTA analysis are: ktup=1, gap opening penalty=10, gap extension penalty=1, and substitution matrix=BLOSUM62. These parameters can be introduced into a FASTA program by modifying the scoring matrix file (“SMATRIX”), as explained in Appendix 2 of Pearson, (22).

[0193] FASTA can also be used to determine the sequence identity of nucleic acid molecules using a ratio as disclosed above. For nucleotide sequence comparisons, the ktup value can range between one to six, preferably from three to six, most preferably three, with other parameters set as default.

[0194] Variations in percent identity can be due, for example, to amino acid substitutions, insertions, or deletions. Amino acid substitutions are defined as one for one amino acid replacements. They are conservative in nature when the substituted amino acid has similar structural and/or chemical properties. Examples of conservative replacements are substitution of a leucine with an isoleucine or valine, an aspartate with a glutamate, or a threonine with a serine.

[0195] Amino acid insertions or deletions are changes to or within an amino acid sequence. They typically fall in the range of about 1 to 5 amino acids. Guidance in determining which amino acid residues can be substituted, inserted, or deleted without abolishing biological or immunological activity of a “BREAST CANCER GENE” polypeptide can be found using computer programs well known in the art, such as DNASTAR software. Whether an amino acid change results in a biologically active “BREAST CANCER GENE” polypeptide can readily be determined by assaying for “BREAST CANCER GENE” activity, as described for example, in the specific Examples, below. Larger insertions or deletions can also be caused by alternative splicing. Protein domains can be inserted or deleted without altering the main activity of the protein.

### Fusion Proteins

[0196] Fusion proteins are useful for generating antibodies against “BREAST CANCER GENE” polypeptide amino acid sequences and for use in various assay systems. For example, fusion proteins can be used to identify proteins which interact with portions of a “BREAST CANCER GENE” polypeptide. Protein affinity chromatography or library-based assays for protein-protein interactions, such as the yeast two-hybrid or phage display systems, can be used for this purpose. Such methods are well known in the art and also can be used as drug screens.

[0197] A “BREAST CANCER GENE” polypeptide fusion protein comprises two polypeptide segments fused together by means of a peptide bond. The first polypeptide segment comprises at least 25, 50, 75, 100, 150, 200, 300, 400, 500, 600, 700 or 750 contiguous amino acids of an amino acid sequence encoded by any polynucleotide sequences of the SEQ ID NO: 1 to 165 and 472 to 491 or of a biologically active variant, such as those described above. The first polypeptide segment also can comprise full-length “BREAST CANCER GENE”.

[0198] The second polypeptide segment can be a full-length protein or a protein fragment. Proteins commonly used in fusion protein construction include β-galactosidase, β-glucuronidase, green fluorescent protein (GFP), autofluorescent proteins, including blue fluorescent protein (BFP), glutathione-5-transferase (GST), luciferase, horseradish peroxidase (HRP), and chloramphenicol acetyltransferase (CAT). Additionally, epitope tags are used in fusion protein constructions, including histidine (His) tags, FLAG tags, influenza hemagglutinin (HA) tags, Myc tags, VSV-G tags, and thioredoxin (Trx) tags. Other fusion constructions can include maltose binding protein (MBP), S-tag, Lex a DNA binding domain (DBD) fusions, GAL4 DNA binding domain fusions, and herpes simplex virus (HSV) BP16 protein fusions. A fusion protein also can be engineered to contain a cleavage site located between the “BREAST CANCER GENE” polypeptide-encoding sequence and the heterologous protein sequence, so that the “BREAST CANCER GENE” polypeptide can be cleaved and purified away from the heterologous moiety.

[0199] A fusion protein can be synthesized chemically, as is known in the art. Preferably, a fusion protein is produced by covalently linking two polypeptide segments or by standard procedures in the art of molecular biology. Recombinant DNA methods can be used to prepare fusion proteins, for example, by making a DNA construct which comprises coding sequences selected from any of the polynucleotide sequences of the SEQ ID NO: 1 to 165 and 472 to 491 in proper reading frame with nucleotides encoding the second polypeptide segment and expressing the DNA construct in a host cell, as is known in the art. Many kits for constructing fusion proteins are available from companies such as Promega Corporation (Madison, Wis.), Stratagene (La Jolla, Calif.), CLONTECH (Mountain View, Calif.), Santa Cruz Biotechnology (Santa Cruz, Calif.), MBL International Corporation (MIC; Watertown, Mass.), and Quantum Biotechnologies (Montreal, Canada; 1-888-DNA-KITS).

### Identification of Species Homologues

[0200] Species homologues of human a “BREAST CANCER GENE” polypeptide can be obtained using “BREAST CANCER GENE” polynucleotides (described below) to make suitable probes or primers for screening cDNA expression libraries from other species, such as mice, monkeys, or yeast, identifying cDNAs which encode homologues of a “BREAST CANCER GENE” polypeptide, and expressing the cDNAs as is known in the art.

### Expression of Polynucleotides

[0201] To express a “BREAST CANCER GENE” polynucleotide, the polynucleotide can be inserted into an expression vector which contains the necessary elements for the transcription and translation of the inserted coding sequence. Methods which are well known to those skilled in the art can be used to construct expression vectors containing sequences encoding “BREAST CANCER GENE” polypeptides and appropriate transcriptional and translational control elements. These methods include in vitro recombinant DNA techniques, synthetic techniques, and in vivo genetic recombination. Such techniques are described, for example, in Sambrook et al., (6) and in Ausubel et al., (7).

[0202] A variety of expression vector/host systems can be utilized to contain and express sequences encoding a “BREAST CANCER GENE” polypeptide. These include, but are not limited to, microorganisms, such as bacteria transformed with recombinant bacteriophage, plasmid, or cosmid DNA expression vectors; yeast transformed with yeast expression vectors, insect cell systems infected with virus expression vectors (e.g., baculovirus), plant cell systems transformed with virus expression vectors (e.g., cauliflower mosaic virus, CaMV; tobacco mosaic virus, TMV) or with bacterial expression vectors (e.g., Ti or pBR322 plasmids), or animal cell systems.

[0203] The control elements or regulatory sequences are those regions of the vector enhancers, promoters, 5′ and 3′ untranslated regions which interact with host cellular proteins to carry out transcription and translation. Such elements can vary in their strength and specificity. Depending on the vector system and host utilized, any number of suitable transcription and translation elements, including constitutive and inducible promoters, can be used. For example, when cloning in bacterial systems, inducible promoters such as the hybrid lacZ promoter of the BLUESCRIPT phagemid (Stratagene, LaJolla, Calif.) or pSPORT1 plasmid (Life Technologies) and the like can be used. The baculovirus polyhedrin promoter can be used in insect cells. Promoters or enhancers derived from the genomes of plant cells (e.g., heat shock, RUBISCO, and storage protein genes) or from plant viruses (e.g., viral promoters or leader sequences) can be cloned into the vector. In mammalian cell systems, promoters from mammalian genes or from mammalian viruses are preferable. If it is necessary to generate a cell line that contains multiple copies of a nucleotide sequence encoding a “BREAST CANCER GENE” polypeptide, vectors based on SV40 or EBV can be used with an appropriate selectable marker.

### Bacterial and Yeast Expression Systems

[0204] In bacterial systems, a number of expression vectors can be selected depending upon the use intended for the “BREAST CANCER GENE” polypeptide. For example, when a large quantity of the “BREAST CANCER GENE” polypeptide is needed for the induction of antibodies, vectors which direct high level expression of fusion proteins that are readily purified can be used. Such vectors include, but are not limited to, multifunctional E. coli cloning and expression vectors such as BLUESCRIPT (Stratagene). In a BLUESCRIPT vector, a sequence encoding the “BREAST CANCER GENE” polypeptide can be ligated into the vector in frame with sequences for the amino terminal Met and the subsequent 7 residues of β-galactosidase so that a hybrid protein is produced. pIN vectors [Van Heeke & Schuster, (113)] or pGEX vectors (Promega, Madison, Wis.) also can be used to express foreign polypeptides as fusion proteins with glutathione S-transferase (GST). In general, such fusion proteins are soluble and can easily be purified from lysed cells by adsorption to glutathione agarose beads followed by elution in the presence of free glutathione. Proteins made in such systems can be designed to include heparin, thrombin, or factor Xa protease cleavage sites so that the cloned polypeptide of interest can be released from the GST moiety at will.

[0205] In the yeast Saccharomyces cerevisiae, a number of vectors containing constitutive or inducible promoters such as alpha factor, alcohol oxidase, and PGH can be used. For reviews, see Ausubel et al., (7) and Grant et al., (114).

### Plant and Insect Expression Systems

[0206] If plant expression vectors are used, the expression of sequences encoding “BREAST CANCER GENE” polypeptides can be driven by any of a number of promoters. For example, viral promoters such as the 35S and 19S promoters of CaMV can be used alone or in combination with the omega leader sequence from TMV [Takamatsu, 1987, (25)]. Alternatively, plant promoters such as the small subunit of RUBISCO or heat shock promoters can be used [Coruzzi et al., 1984, (26); Broglie et al., 1984, (27); Winter et al., 1991, (28)]. These constructs can be introduced into plant cells by direct DNA transformation or by pathogen-mediated transfection. Such techniques are described in a number of generally available reviews.

[0207] An insect system also can be used to express a “BREAST CANCER GENE” polypeptide. For example, in one such system Autographa californica nuclear polyhedrosis virus (AcNPV) is used as a vector to express foreign genes in Spodoptera frugiperda cells or in Trichoplusia larvae. Sequences encoding “BREAST CANCER GENE” polypeptides can be cloned into a nonessential region of the virus, such as the polyhedrin gene, and placed under control of the polyhedrin promoter. Successful insertion of “BREAST CANCER GENE” polypeptides will render the polyhedrin gene inactive and produce recombinant virus lacking coat protein. The recombinant viruses can then be used to infect S. frugiperda cells or Trichoplusia larvae in which “BREAST CANCER GENE” polypeptides can be expressed [Engelhard et al., 1994, (29)].

### Mammalian Expression Systems

[0208] A number of viral-based expression systems can be used to express “BREAST CANCER GENE” polypeptides in mammalian host cells. For example, if an adenovirus is used as an expression vector, sequences encoding “BREAST CANCER GENE” polypeptides can be ligated into an adenovirus transcription/translation complex comprising the late promoter and tripartite leader sequence. Insertion in a nonessential E1 or E3 region of the viral genome can be used to obtain a viable virus which is capable of expressing a “BREAST CANCER GENE” polypeptide in infected host cells [Logan & Shenk, 1984, (30)]. If desired, transcription enhancers, such as the Rous sarcoma virus (RSV) enhancer, can be used to increase expression in mammalian host cells.

[0209] Human artificial chromosomes (HACs) also can be used to deliver larger fragments of DNA than can be contained and expressed in a plasmid. HACs of 6M to 10M are constructed and delivered to cells via conventional delivery methods (e.g., liposomes, polycationic amino polymers, or vesicles).

[0210] Specific initiation signals also can be used to achieve more efficient translation of sequences encoding “BREAST CANCER GENE” polypeptides. Such signals include the ATG initiation codon and adjacent sequences. In cases where sequences encoding a “BREAST CANCER GENE” polypeptide, its initiation codon, and upstream sequences are inserted into the appropriate expression vector, no additional transcriptional or translational control signals may be needed. However, in cases where only coding sequence, or a fragment thereof, is inserted; exogenous translational control signals (including the ATG initiation codon) should be provided. The initiation codon should be in the correct reading frame to ensure translation of the entire insert. Exogenous translational. elements and initiation codons can be of various origins, both natural and synthetic. The efficiency of expression can be enhanced by the inclusion of enhancers which are appropriate for the particular cell system which is used [Scharf et al., 1994, (31)].

### Host Cells

[0211] A host cell strain can be chosen for its ability to modulate the expression of the inserted sequences or to process the expressed “BREAST CANCER GENE” polypeptide in the desired fashion. Such modifications of the polypeptide include, but are not limited to, acetylation, carboxylation, glycosylation, phosphorylation, lipidation, and acylation. Posttranslational processing which cleaves a “prepro” form of the polypeptide also can be used to facilitate correct insertion, folding and/or function. Different host cells which have specific cellular machinery and characteristic mechanisms for Post-translational activities (e.g., CHO, HeLa, MDCK, HEK293, and WI38), are available from the American Type Culture Collection (ATCC; 10801 University Boulevard, Manassas, Va. 20110-2209) and can be chosen to ensure the correct modification and processing of the foreign protein.

[0212] Stable expression is preferred for long-term, high-yield production of recombinant proteins. For example, cell lines which stably express “BREAST CANCER GENE” polypeptides can be transformed using expression vectors which can contain viral origins of replication and/or endogenous expression elements and a selectable marker gene on the same or on a separate vector. Following the introduction of the vector, cells can be allowed to grow for 12 days in an enriched medium before they are switched to a selective medium. The purpose of the selectable marker is to confer resistance to selection, and its presence allows growth and recovery of cells which successfully express the introduced “BREAST CANCER GENE” sequences. Resistant clones of stably transformed cells can be proliferated using tissue culture techniques appropriate to the cell type [Freshney et al., 1986, (32).

[0213] Any number of selection systems can be used to recover transformed cell lines. These include, but are not limited to, the herpes simplex virus thymidine kinase (Wigler et al., 1977, (33)] and adenine phosphoribosyltransferase [Lowy et al., 1980, (34)] genes which can be employed in tk⁻ or aprt⁻ cells, respectively. Also, antimetabolite, antibiotic, or herbicide resistance can be used as the basis for selection. For example, dhfr confers resistance to methotrexate [Wigler et al., 1980, (35)], npt confers resistance to the aminoglycosides, neomycin and G418 [Colbere-Garapin et al., 1981, (36)], and als and pat confer resistance to chlorsulfuron and phosphinotricin acetyltransferase, respectively. Additional selectable genes have been described. For example, trpB allows cells to utilize indole in place of tryptophan, or hisD, which allows cells to utilize histinol in place of histidine [Hartman & Mulligan, 1988,(37)]. Visible markers such as anthocyanins, β-glucuronidase and its substrate GUS, and luciferase and its substrate luciferin, can be used to identify transformants and to quantify the amount of transient or stable protein expression attributable to a specific vector system [Rhodes et al., 1995, (38)].

### Detecting Expression and Gene Product

[0214] Although the presence of marker gene expression suggests that the “BREAST CANCER GENE” polynucleotide is also present, its presence and expression may need to be confirmed. For example, if a sequence encoding a “BREAST CANCER GENE” polypeptide is inserted within a marker gene sequence, transformed cells containing sequences which encode a “BREAST CANCER GENE” polypeptide can be identified by the absence of marker gene function. Alternatively, a marker gene can be placed in tandem with a sequence encoding a “BREAST CANCER GENE” polypeptide under the control of a single promoter. Expression of the marker gene in response to induction or selection usually indicates expression of the “BREAST CANCER GENE” polynucleotide.

[0215] Alternatively, host cells which contain a “BREAST CANCER GENE” polynucleotide and which express a “BREAST CANCER GENE” polypeptide can be identified by a variety of procedures known to those of skill in the art. These procedures include, but are not limited to, DNA-DNA or DNA-RNA hybridization and protein bioassay or immunoassay techniques which include membrane, solution, or chip-based technologies for the detection and/or quantification of polynucleotide or protein. For example, the presence of a polynucleotide sequence encoding a “BREAST CANCER GENE” polypeptide can be detected by DNA-DNA or DNA-RNA hybridization or amplification using probes or fragments or fragments of polynucleotides encoding a “BREAST CANCER GENE” polypeptide. Nucleic acid amplification-based assays involve the use of oligonucleotides selected from sequences encoding a “BREAST CANCER GENE” polypeptide to detect transformants which contain a “BREAST CANCER GENE” polynucleotide.

[0216] A variety of protocols for detecting and measuring the expression of a “BREAST CANCER GENE” polypeptide, using either polyclonal or monoclonal antibodies specific for the polypeptide, are known in the art. Examples include enzyme-linked immunosorbent assay (ELISA), radioimmunoassay (RIA), and fluorescence activated cell sorting (FACS). A two-site, monoclonal-based immunoassay using monoclonal antibodies reactive to two non-interfering epitopes on a “BREAST CANCER GENE” polypeptide can be used, or a competitive binding assay can be employed. These and other assays are described in Hampton et al., (39) and Maddox et al., 40).

[0217] A wide variety of labels and conjugation techniques are known by those skilled in the art and can be used in various nucleic acid and amino acid assays. Means for producing labeled hybridization or PCR probes for detecting sequences related to polynucleotides encoding “BREAST CANCER GENE” polypeptides include oligo labeling, nick translation, end-labeling, or PCR amplification using a labeled nucleotide. Alternatively, sequences encoding a “BREAST CANCER GENE” polypeptide can be cloned into a vector for the production of an mRNA probe. Such vectors are known in the art, are commercially available, and can be used to synthesize RNA probes in vitro by addition of labeled nucleotides and an appropriate RNA polymerase such as T7, T3, or SP6. These procedures can be conducted using a variety of commercially available kits (Amersham Pharmacia Biotech, Promega, and US Biochemical). Suitable reporter molecules or labels which can be used for ease of detection include radionuclides, enzymes, and fluorescent, chemiluminescent, or chromogenic agents, as well as substrates, cofactors, inhibitors, magnetic particles, and the like.

### Expression and Purification of Polypeptides

[0218] Host cells transformed with nucleotide sequences encoding a “BREAST CANCER GENE” polypeptide can be cultured under conditions suitable for the expression and recovery of the protein from cell culture. The polypeptide produced by a transformed cell can be secreted or stored intracellular depending on the sequence and/or the vector used. As will be understood by those of skill in the art, expression vectors containing polynucleotides which encode “BREAST CANCER GENE” polypeptides can be designed to contain signal sequences which direct secretion of soluble “BREAST CANCER GENE” polypeptides through a prokaryotic or eukaryotic cell membrane or which direct the membrane insertion of membrane-bound “BREAST CANCER GENE” polypeptide.

[0219] As discussed above, other constructions can be used to join a sequence encoding a “BREAST CANCER GENE” polypeptide to a nucleotide sequence encoding a polypeptide domain which will facilitate purification of soluble proteins. Such purification facilitating domains include, but are not limited to, metal chelating peptides such as histidine-tryptophan modules that allow purification on immobilized metals, protein A domains that allow purification on immobilized immunoglobulin, and the domain utilized in the FLAGS extension/affinity purification system (Immunex Corp., Seattle, Wash.). Inclusion of cleavable linker sequences such as those specific for Factor Xa or enteroidnase (Invitrogen, San Diego, Calif.) between the purification domain and the “BREAST CANCER GENE” polypeptide also can be used to facilitate purification. One such expression vector provides for expression of a fusion protein containing a “BREAST CANCER GENE” polypeptide and 6 histidine residues preceding a thioredoxin or an enterokinase cleavage site. The histidine residues facilitate purification by IMAC (immobilized metal ion affinity chromatography [Porath et al., 1992, (41)], while the enterokinase cleavage site provides a means for purifying the “BREAST CANCER GENE” polypeptide from the fusion protein. Vectors which contain fusion proteins are disclosed in Kroll et al., (42).

### Chemical Synthesis

[0220] Sequences encoding a “BREAST CANCER GENE” polypeptide can be synthesized, in whole or in part, using chemical methods well known in the art (see Caruthers et al., (43) and Horn et al., (44). Alternatively, a “BREAST CANCER GENE” polypeptide itself can be produced using chemical methods to synthesize its amino acid sequence, such as by direct peptide synthesis using solid-phase techniques [Merrifield, 1963, (45) and Roberge et al., 1995, (46)]. Protein synthesis can be performed using manual techniques or by automation. Automated synthesis can be achieved, for example, using Applied Biosystems 431A Peptide Synthesizer (Perkin Elmer). Optionally, fragments of “BREAST CANCER GENE” polypeptides can be separately synthesized and combined using chemical methods to produce a full-length molecule.

[0221] The newly synthesized peptide can be substantially purified by preparative high performance liquid chromatography [Creighton, 1983, (47)]. The composition of a synthetic “BREAST CANCER GENE” polypeptide can be confirmed by amino acid analysis or sequencing (e.g., the Edman degradation procedure; see Creighton, (47). Additionally, any portion of the amino acid sequence of the “BREAST CANCER GENE” polypeptide can be altered during direct synthesis and/or combined using chemical methods with sequences from other proteins to produce a variant polypeptide or a fusion protein.

### Production of Altered Polypeptides

[0222] As will be understood by those of skill in the art, it may be advantageous to produce “BREAST CANCER GENE” polypeptide-encoding nucleotide sequences possessing non-natural occurring codons. For example, codons preferred by a particular prokaryotic or eukaryotic host can be selected to increase the rate of protein expression or to produce an RNA transcript having desirable properties, such as a half-life which is longer than that of a transcript generated from the naturally occurring sequence.

[0223] The nucleotide sequences disclosed herein can be engineered using methods generally known in the art to alter “BREAST CANCER GENE” polypeptide-encoding sequences for a variety of reasons, including but not limited to, alterations which modify the cloning, processing, and/or expression of the polypeptide or mRNA product. DNA shuffling by random fragmentation and PCR re-assembly of gene fragments and synthetic oligonucleotides can be used to engineer the nucleotide sequences. For example, site-directed mutagenesis can be used to insert new restriction sites, alter glycosylation patterns, change codon preference, produce splice variants, introduce mutations, and so forth.

### Predictive, Diagnostic and Prognostic Assays

[0224] The present invention provides compositions, methods, and kits for determining whether a subject is at risk for developing malignant neoplasia and breast cancer in particular by detecting the disclosed biomarkers, i.e., the disclosed polynucleotide markers comprising any of the polynucleotides sequences of the SEQ ID NO 1 to 165 and 472 to 491 and/or the polypeptide markers encoded thereby or polypeptide markers comprising any of the polypeptide sequences of the SEQ ID NO: 166 to 330 and 492 to 511 for malignant neoplasia and breast cancer in particular.

[0225] In clinical applications, biological samples can be screened for the presence and/or absence of the biomarkers identified herein. Such samples are for example needle biopsy cores, surgical resection samples, or body fluids like serum, thin needle nipple aspirates and urine. For example, these methods include obtaining a biopsy, which is optionally fractionated by cryostat sectioning to enrich diseases cells to about 80% of the total cell population. In certain embodiments, polynucleotides extracted from these samples may be amplified using techniques well known in the art. The expression levels of selected markers detected would be compared with statistically valid groups of diseased and healthy samples.

[0226] In one embodiment the compositions, methods, and kits comprises determining whether a subject has an abnormal mRNA and/or protein level of the disclosed markers, such as by Northern blot analysis, reverse transcription-polymerase chain reaction (RT-PCR), in situ hybridization, immunoprecipitation, Western blot hybridization, or immunohistochemistry. According to the method, cells are obtained from a subject and the levels of the disclosed biomarkers, protein or mRNA level, is determined and compared to the level of these markers in a healthy subject. An abnormal level of the biomarker polypeptide or mRNA levels is likely to be indicative of malignant neoplasia such as breast cancer.

[0227] In another embodiment the compositions, methods, and kits comprises determining whether a subject has an abnormal DNA content of said genes or said genomic loci, such as by Southern blot analysis, dot blot analysis, Fluorescence or Colorimetric In Situ Hybridization, Comparative Genomic Hybridization or quantitative PCR. In general these assays comprise the usage of probes from representative genomic regions. The probes contain at least parts of said genomic regions or sequences complementary or analogous to said regions. In particular intra- or intergenic regions of said genes or genomic regions. The probes can consist of nucleotide sequences or sequences of analogous functions (e.g. PNAs, Morpholino oligomers) being able to bind to target regions by hybridization. In general genomic regions being altered in said patient samples are compared with unaffected control samples (normal tissue from the same or different patients, surrounding unaffected tissue, peripheral blood) or with genomic regions of the same sample that don't have said alterations and can therefore serve as internal controls. In a preferred embodiment regions located on the same chromosome are used. Alternatively, gonosomal regions and/or regions with defined varying amount in the sample are used. In one favored embodiment the DNA content, structure, composition or modification is compared that lie within distinct genomic regions. Especially favored are methods that detect the DNA content of said samples, where the amount of target regions are altered by amplification and or deletions. In another embodiment the target regions are analyzed for the presence of polymorphisms (e.g. Single Nucleotide Polymorphisms or mutations) that affect or predispose the cells in said samples with regard to clinical aspects, being of diagnostic, prognostic or therapeutic value. Preferably, the identification of sequence variations is used to define haplotypes that result in characteristic behavior of said samples with said clinical aspects.

[0228] In one embodiment, the compositions, methods, and kits for the prediction, diagnosis or prognosis of malignant neoplasia and breast cancer in particular are done by the detection of:
[0229] (a) a polynucleotide selected from the polynucleotides of the SEQ ID NO: 1 to 165 and 472 to 491;
[0230] (b) a polynucleotide which hybridizes under stringent conditions to a polynucleotide specified in (a) encoding a polypeptide exhibiting the same biological function as specified for the respective sequence in Table 1a and 1b or 4a and 4b;
[0231] (c) a polynucleotide the sequence of which deviates from the polynucleotide specified in (a) and (b) due to the generation of the genetic code encoding a polypeptide exhibiting the same biological function as specified for the polypeptides of SEQ ID NO: 166 to 330 and 492 to 511
[0232] (d) a polynucleotide which represents a specific fragment, derivative or allelic variation of a polynucleotide sequence specified in (a) to (c) encoding a polypeptide exhibiting the same biological function as specified for the respective sequence in Table 1a and 1b or 4a and 4b;
   in a biological sample comprising the following steps: hybridizing any polynucleotide or analogous oligomer specified in (a) to (d) to a polynucleotide material of a biological sample, thereby forming a hybridization complex; and detecting said hybridization complex.

[0233] In another embodiment the method for the prediction, diagnosis or prognosis of malignant neoplasia is done as just described but, wherein before hybridization, the polynucleotide material of the biological sample is amplified.

[0234] In another embodiment the method for the diagnosis or prognosis of malignant neoplasia and breast cancer in particular is done by the detection of:
[0235] (a) a polynucleotide selected from the polynucleotides of the SEQ ID NO: 166 to 330 and 492 to 511;
[0236] (b) a polynucleotide which hybridizes under stringent conditions to a polynucleotide specified in (a) encoding a polypeptide exhibiting the same biological function as specified for the respective sequence in Table 1a and 1b or 4a and 4b;
[0237] (c) a polynucleotide the sequence of which deviates from the polynucleotide specified in (a) and (b) due to the generation of the genetic code encoding a polypeptide exhibiting the same biological function as specified for the respective sequence in Table 1a and 1b or 4a and 4b;
[0238] (d) a polynucleotide which represents a specific fragment, derivative or allelic variation of a polynucleotide sequence specified in (a) to (c) encoding a polypeptide exhibiting the same biological function as specified for the respective sequence in Table 1a and 1b or 4a and 4b;
[0239] (e) a polypeptide encoded by a polynucleotide sequence specified in (a) to (d)
[0240] (f) a polypeptide comprising any polypeptide of SEQ 1) NO: 166 to 330 and 492 to 511
[0241] (g)
   comprising the steps of contacting a biological sample with a reagent which specifically interacts with the polynucleotide specified in (a) to (d) or the polypeptide specified in (e).

### 1. DNA Array Technology

[0242] In one embodiment, the present Invention also provides a method wherein polynucleotide probes are immobilized an a DNA chip in an organized array. Oligonucleotides can be bound to a solid Support by a variety of processes, including lithography. For example a chip can hold up to 410.000 oligonucleotides (GeneChip, Affymetrix). The present invention provides significant advantages over the available tests for malignant neoplasia, such as breast cancer, because it increases the reliability of the test by providing an array of polynucleotide markers an a single chip.

[0243] The method includes obtaining a biological sample which can be a biopsy of an affected person, which is optionally fractionated by cryostat sectioning to enrich diseased cells to about 80% of the total cell population and the use of body fluids such as serum or urine, serum or cell containing liquids (e.g. derived from fine needle aspirates). The DNA or RNA is then extracted, amplified, and analyzed with a DNA chip to determine the presence of absence of the marker polynucleotide sequences. In one embodiment, the polynucleotide probes are spotted onto a substrate in a two-dimensional matrix or array. samples of polynucleotides can be labeled and then hybridized to the probes. Double-stranded polynucleotides, comprising the labeled sample polynucleotides bound to probe polynucleotides, can be detected once the unbound portion of the sample is washed away.

[0244] The probe polynucleotides can be spotted on substrates including glass, nitrocellulose, etc. The probes can be bound to the substrate by either covalent bonds or by non-specific interactions, such as hydrophobic interactions. The sample polynucleotides can be labeled using radioactive labels, fluorophores, chromophores, etc. Techniques for constructing arrays and methods of using these arrays are described in EP 0 799 897; WO 97/29212; WO 97/27317; EP 0 785 280; WO 97/02357; U.S. Pat. No. 5,593±839; U.S. Pat. No. 5,578,832; EP 0 728 520; U.S. Pat. No. 5,599,695; EP 0 721 016; U.S. Pat. No. 5,556,752; WO 95/22058; and U.S. Pat. No. 5,631,734. Further, arrays can be used to examine differential expression of genes and can be used to determine gene function. For example, arrays of the instant polynucleotide sequences can be used to determine if any of the polynucleotide sequences are differentially expressed between normal cells and diseased cells, for example. High expression of a particular message in a diseased sample, which is not observed in a corresponding normal sample, can indicate a breast cancer specific protein.

[0245] Accordingly, in one aspect, the invention provides probes and primers that are specific to the polynucleotide sequences of SEQ ID NO: 1 to 165 and 472 to 491.

[0246] In one embodiment, the composition, method, and kit comprise using a polynucleotide probe to determine the presence of malignant or breast cancer cells in particular in a tissue from a patient. Specifically, the method comprises:
[0247] 1) providing a polynucleotide probe comprising a nucleotide sequence at least 12 nucleotides in length, preferably at least 15 nucleotides, more preferably, 25 nucleotides, and most preferably at least 40 nucleotides, and up to all or nearly all of the coding sequence which is complementary to a portion of the coding sequence of a polynucleotide selected from the polynucleotides of SEQ ID NO: 1 to 165 and 472 to 491 or a sequence complementary thereto;
[0248] 2) obtaining a tissue sample from a patient with malignant neoplasia;
[0249] 3) providing a second tissue sample from a patient with no malignant neoplasia;
[0250] 4) contacting the polynucleotide probe under stringent conditions with RNA of each of said first and second tissue samples (e.g., in a Northern blot or in situ hybridization assay); and
[0251] 5) comparing (a) the amount of hybridization of the probe with RNA of the first tissue sample, with (b) the amount of hybridization of the probe with RNA of the second tissue sample;
   wherein a statistically significant difference in the amount of hybridization with the RNA of the first tissue sample as compared to the amount of hybridization with the RNA of the second tissue sample is indicative of malignant neoplasia and breast cancer in particular in the first tissue sample.

### 2. Data Analysis Methods

[0252] Comparison of the expression levels of one or more “BREAST CANCER GENES” with reference expression levels, e.g., expression levels in diseased cells of breast cancer or in normal counterpart cells, is preferably conducted using computer systems. In one embodiment, expression levels are obtained in two cells and these two sets of expression levels are introduced into a computer system for comparison. In a preferred embodiment, one set of expression levels is entered into a computer system for comparison with values that are already present in the computer system, or in computer-readable form that is then entered into the computer system.

[0253] In one embodiment, the invention provides a computer readable form of the gene expression profile data of the invention, or of values corresponding to the level of expression of at least one “BREAST CANCER GENE” in a diseased cell. The values can be mRNA expression levels obtained from experiments, e.g., microarray analysis. The values can also be mRNA levels normalised relative to a reference gene whose expression is constant in numerous cells under numerous conditions, e.g., GAPDH. In other embodiments, the values in the computer are ratios of, or differences between, normalized or non-normalized mRNA levels in different samples.

[0254] The gene expression profile data can be in the form of a table, such as an Excel table. The data can be alone, or it can be part of a larger database, e.g., comprising other expression profiles. For example, the expression profile data of the invention can be part of a public database. The computer readable form can be in a computer. In another embodiment, the invention provides a computer displaying the gene expression profile data.

[0255] In one embodiment, the invention provides a method for determining the similarity between the level of expression of one or more “BREAST CANCER GENES” in a first cell, e.g., a cell of a subject, and that in a second cell, comprising obtaining the level of expression of one or more “BREAST CANCER GENES” in a first cell and entering these values into a computer comprising a database including records comprising values corresponding to levels of expression of one or more “BREAST CANCER GENES” in a second cell, and processor instructions, e.g., a user interface, capable of receiving a selection of one or more values for comparison purposes with data that is stored in the computer. The computer may further comprise a means for converting the comparison data into a diagram or chart or other type of output.

[0256] In another embodiment, values representing expression levels of “BREAST CANCER GENES” are entered into a computer system, comprising one or more databases with reference expression levels obtained from more than one cell. For example, the computer comprises expression data of diseased and normal cells. Instructions are provided to the computer, and the computer is capable of comparing the data entered with the data in the computer to determine whether the data entered is more similar to that of a normal cell or of a diseased cell.

[0257] In another embodiment, the computer comprises values of expression levels in cells of subjects at different stages of breast cancer, and the computer is capable of comparing expression data entered into the computer with the data stored, and produce results indicating to which of the expression profiles in the computer, the one entered is most similar, such as to determine the stage of breast cancer in the subject.

[0258] In yet another embodiment, the reference expression profiles in the computer are expression profiles from cells of breast cancer of one or more subjects, which cells are treated in vivo or in vitro with a drug used for therapy of breast cancer. Upon entering of expression data of a cell of a subject treated in vitro or in vivo with the drug, the computer is instructed to compare the data entered to the data in the computer, and to provide results indicating whether the expression data input into the computer are more similar to those of a cell of a subject that is responsive to the drug or more similar to those of a cell of a subject that is not responsive to the drug. Thus, the results indicate whether the subject is likely to respond to the treatment with the drug or unlikely to respond to it.

[0259] In one embodiment, the invention provides a system that comprises a means for receiving gene expression data for one or a plurality of genes; a means for comparing the gene expression data from each of said one or plurality of genes to a common reference frame; and a means for presenting the results of the comparison. This system may further comprise a means for clustering the data.

[0260] In another embodiment, the invention provides a computer program for analyzing gene expression data comprising (i) a computer code that receives as input gene expression data for a plurality of genes and (ii) a computer code that compares said gene expression data from each of said plurality of genes to a common reference frame.

[0261] The invention also provides a machine-readable or computer-readable medium including program instructions for performing the following steps: (i) comparing a plurality of values corresponding to expression levels of one or more genes characteristic of breast cancer in a query cell with a database including records comprising reference expression or expression profile data of one or more reference cells and an annotation of the type of cell; and (ii) indicating to which cell the query cell is most similar based on similarities of expression profiles. The reference cells can be cells from subjects at different stages of breast cancer. The reference cells can also be cells from subjects responding or not responding to a particular drug treatment and optionally incubated in vitro or in vivo with the drug.

[0262] The reference cells may also be cells from subjects responding or not responding to several different treatments, and the computer system indicates a preferred treatment for the subject. Accordingly, the invention provides a method for selecting a therapy for a patient having breast cancer, the method comprising: (i) providing the level of expression of one or more genes characteristic of breast cancer in a diseased cell of the patient; (ii) providing a plurality of reference profiles, each associated with a therapy, wherein the subject expression profile and each reference profile has a plurality of values, each value representing the level of expression of a gene characteristic of breast cancer; and (iii) selecting the reference profile most similar to the subject expression profile, to thereby select a therapy for said patient. In a preferred embodiment step (iii) is performed by a computer. The most similar reference profile may be selected by weighing a comparison value of the plurality using a weight value associated with the corresponding expression data.

[0263] The relative abundance of an mRNA in two biological samples can be scored as a perturbation and its magnitude determined (i.e., the abundance is different in the two sources of mRNA tested), or as not perturbed (i.e., the relative abundance is the same). In various embodiments, a difference between the two sources of RNA of at least a factor of about 25% (RNA from one source is 25% more abundant in one source than the other source), more usually about 50%, even more often by a factor of about 2 (twice as abundant), 3 (three times as abundant) or 5 (five times as abundant) is scored as a perturbation. Perturbations can be used by a computer for calculating and expression comparisons.

[0264] Preferably, in addition to identifying a perturbation as positive or negative, it is advantageous to determine the magnitude of the perturbation. This can be carried out, as noted above, by calculating the ratio of the emission of the two fluorophores used for differential labeling, or by analogous methods that will be readily apparent to those of skill in the art.

[0265] The computer readable medium may further comprise a pointer to a descriptor of a stage of breast cancer or to a treatment for breast cancer.

[0266] In operation, the means for receiving gene expression data, the means for comparing the gene expression data, the means for presenting, the means for normalizing, and the means for clustering within the context of the systems of the present invention can involve a programmed computer with the respective functionalities described herein, implemented in hardware or hardware and software; a logic circuit or other component of a programmed computer that performs the operations specifically identified herein, dictated by a computer program; or a computer memory encoded with executable instructions representing a computer program that can cause a computer to function in the particular fashion described herein.

[0267] Those skilled in the art will understand that the systems and methods of the present invention may be applied to a variety of systems, including IBM-compatible personal computers running MS-DOS or Microsoft Windows.

[0268] The computer may have internal components linked to external components. The internal components may include a processor element interconnected with a main memory. The computer system can be an Intel Pentium®-based processor of 200 MHz or greater clock rate and with 32 MB or more of main memory. The external component may comprise a mass storage, which can be one or more hard disks (which are typically packaged together with the processor and memory). Such hard disks are typically of 1 GB or greater storage capacity. Other external components include a user interface device, which can be a monitor, together with an inputting device, which can be a “mouse”, or other graphic input devices, and/or a keyboard. A printing device can also be attached to the computer.

[0269] Typically, the computer system is also linked to a network link, which can be part of an Ethernet link to other local computer systems, remote computer systems, or wide area communication networks, such as the Internet. This network link allows the computer system to share data and processing tasks with other computer systems.

[0270] Loaded into memory during operation of this system are several software components, which are both standard in the art and special to the instant invention. These software components collectively cause the computer system to function according to the methods of this invention. These software components are typically stored on a mass storage. A software component represents the operating system, which is responsible for managing the computer system and its network interconnections. This operating system can be, for example, of the Microsoft Windows' family, such as Windows 95, Windows 98, or Windows NT. A software component represents common languages and functions conveniently present on this system to assist programs implementing the methods specific to this invention. Many high or low level computer languages can be used to program the analytic methods of this invention. Instructions can be interpreted during run-time or compiled. Preferred languages include C/C++, and JAVA®. Most preferably, the methods of this invention are programmed in mathematical software packages which allow symbolic entry of equations and high-level specification of processing, including algorithms to be used, thereby freeing a user of the need to procedurally program individual equations or algorithms. Such packages include Matlab from Mathworks (Natick, Mass.), Mathematica from Wolfram Research (Champaign, Ill.), or S-Plus from Math Soft (Cambridge, Mass.). Accordingly, a software component represents the analytic methods of this invention as programmed in a procedural language or symbolic package. In a preferred embodiment, the computer system also contains a database comprising values representing levels of expression of one or more genes characteristic of breast cancer. The database may contain one or more expression profiles of genes characteristic of breast cancer in different cells.

[0271] In an exemplary implementation, to practice the methods of the present invention, a user first loads expression profile data into the computer system. These data can be directly entered by the user from a monitor and keyboard, or from other computer systems linked by a network connection, or on removable storage media such as a CD-ROM or floppy disk or through the network. Next the user causes execution of expression profile analysis software which performs the steps of comparing and, e.g., clustering co-varying genes into groups of genes.

[0272] In another exemplary implementation, expression profiles are compared using a method described in U.S. Pat. No. 6,203,987. A user first loads expression profile data into the computer system. Geneset profile definitions are loaded into the memory from the storage media or from a remote computer, preferably from a dynamic geneset database system, through the network. Next the user causes execution of projection software which performs the steps of converting expression profile to projected expression profiles. The projected expression profiles are then displayed.

[0273] In yet another exemplary implementation, a user first leads a projected profile into the memory. The user then causes the loading of a reference profile into the memory. Next, the user causes the execution of comparison software which performs the steps of objectively comparing the profiles.

### 3. Detection of Variant Polynucleotide Sequence

[0274] In yet another embodiment, the invention provides methods for determining whether a subject is at risk for developing a disease, such as a predisposition to develop malignant neoplasia, for example breast cancer, associated with an aberrant activity of any one of the polypeptides encoded by any of the polynucleotides of the SEQ ID NO: 1 to 165 and 472 to 491, wherein the aberrant activity of the polypeptide is characterized by detecting the presence or absence of a genetic lesion characterized by at least one of these:
[0275] (i) an alteration affecting the integrity of a gene encoding a marker polypeptides, or
[0276] (ii) the misexpression of the encoding polynucleotide.

[0277] To illustrate, such genetic lesions can be detected by ascertaining the existence of at least one of these:
[0278] I. a deletion of one or more nucleotides from the polynucleotide sequence
[0279] II. an addition of one or more nucleotides to the polynucleotide sequence
[0280] III. a substitution of one or more nucleotides of the polynucleotide sequence
[0281] IV. a gross chromosomal rearrangement of the polynucleotide sequence
[0282] V. a gross alteration in the level of a messenger RNA transcript of the polynucleotide sequence
[0283] VI. aberrant modification of the polynucleotide sequence, such as of the methylation pattern of the genomic DNA
[0284] VII. the presence of a non-wild type splicing pattern of a messenger RNA transcript of the gene
[0285] VIII. a non-wild type level of the marker polypeptide
[0286] IX. allelic loss of the gene
[0287] X. inappropriate post-translational modification of the marker polypeptide

[0288] The present invention provides assay techniques for detecting mutations in the encoding polynucleotide sequence. These methods include, but are not limited to, methods involving sequence analysis, Southern blot hybridization, restriction enzyme site mapping, and methods involving detection of absence of nucleotide pairing between the polynucleotide to be analyzed and a probe.

[0289] Specific diseases or disorders, e.g., genetic diseases or disorders, are associated with specific allelic variants of polymorphic regions of certain genes, which do not necessarily encode a mutated protein. Thus, the presence of a specific allelic variant of a polymorphic region of a gene in a subject can render the subject susceptible to developing a specific disease or disorder. Polymorphic regions in genes, can be identified, by determining the nucleotide sequence of genes in populations of individuals. If a polymorphic region is identified, then the link with a specific disease can be determined by studying specific populations of individuals, e.g. individuals which developed a specific disease, such as breast cancer. A polymorphic region can be located in any region of a gene, e.g., exons, in coding or non coding regions of exons, introns, and promoter region.

[0290] In an exemplary embodiment, there is provided a polynucleotide composition comprising a polynucleotide probe including a region of nucleotide sequence which is capable of hybridising to a sense or antisense sequence of a gene or naturally occurring mutants thereof, or 5′ or 3′ flanking sequences or intronic sequences naturally associated with the subject genes or naturally occurring mutants thereof. The polynucleotide of a cell is rendered accessible for hybridization, the probe is contacted with the polynucleotide of the sample, and the hybridization of the probe to the sample polynucleotide is detected. Such techniques can be used to detect lesions or allelic variants at either the genomic or mRNA level, including deletions, substitutions, etc., as well as to determine mRNA transcript levels.

[0291] A preferred detection method is allele specific hybridization using probes overlapping the mutation or polymorphic site and having about 5, 10, 20, 25, or 30 nucleotides around the mutation or polymorphic region. In a preferred embodiment of the invention, several probes capable of hybridising specifically to allelic variants are attached to a solid phase support, e.g., a “chip”. Mutation detection analysis using these chips comprising oligonucleotides, also termed “DNA probe arrays” is described e.g., in Cronin et al. (48). In one embodiment, a chip comprises all the allelic variants of at least one polymorphic region of a gene. The solid phase support is then contacted with a test polynucleotide and hybridization to the specific probes is detected. Accordingly, the identity of numerous allelic variants of one or more genes can be identified in a simple hybridization experiment.

[0292] In certain embodiments, detection of the lesion comprises utilizing the probe/primer in a polymerase chain reaction (PCR) (see, e.g. U.S. Pat. Nos. 4,683,195 and 4,683,202), such as anchor PCR or RACE PCR, or, alternatively, in a ligase chain reaction (LCR) [Landegran et al., 1988, (49) and Nakazawa et al., 1994 (50)], the latter of which can be particularly useful for detecting point mutations in the gene; Abravaya et al., 1995, (51)]. In a merely illustrative embodiment, the method includes the steps of (i) collecting a sample of cells from a patient, (ii) isolating polynucleotide (e.g., genomic, mRNA or both) from the cells of the sample, (iii) contacting the polynucleotide sample with one or more primers which specifically hybridize to a polynucleotide sequence under conditions such that hybridization and amplification of the polynucleotide (if present) occurs, and (iv) detecting the presence or absence of an amplification product, or detecting the size of the amplification product and comparing the length to a control sample. It is anticipated that PCR and/or LCR may be desirable to use as a preliminary amplification step in conjunction with any of the techniques used for detecting mutations described herein.

[0293] Alternative amplification methods include: self sustained sequence replication [Guatelli, J. C. et al., 1990, (52)], transcriptional amplification system [Kwoh, D. Y. et al., 1989, (53)], Q-Beta replicase [Lizardi, P. M. et al., 1988, (54)], or any other polynucleotide amplification method, followed by the detection of the amplified molecules using techniques well known to those of skill in the art. These detection schemes are especially useful for the detection of polynucleotide molecules if such molecules are present in very low numbers.

[0294] In a preferred embodiment of the subject assay, mutations in, or allelic variants, of a gene from a sample cell are identified by alterations in restriction enzyme cleavage patterns. For example, sample and control DNA is isolated, amplified (optionally), digested with one or more restriction endonucleases, and fragment length sizes are determined by gel electrophoresis. Moreover; the use of sequence specific ribozymes (see, for example, U.S. Pat. No. 5,498,531) can be used to score for the presence of specific mutations by development or loss of a ribozyme cleavage site.

### 4. In Situ Hybridization

[0295] In one aspect, the method comprises in situ hybridization with a probe derived from a given marker polynucleotide, which sequence is selected from any of the polynucleotide sequences of the SEQ ID NO: 1 to 165 and 472 to 491 or a sequence complementary thereto. The method comprises contacting the labeled hybridization probe with a sample of a given type of tissue from a patient potentially having malignant neoplasia and breast cancer in particular as well as normal tissue from a person with no malignant neoplasia, and determining whether the probe labels tissue of the patient to a degree significantly different (e.g., by at least a factor of two, or at least a factor of five, or at least a factor of twenty, or at least a factor of fifty) than the degree to which normal tissue is labelled.

### Polypeptide Detection

[0296] The subject invention further provides a method of determining whether a cell sample obtained from a subject possesses an abnormal amount of marker polypeptide which comprises (a) obtaining a cell sample from the subject, (b) quantitatively determining the amount of the marker polypeptide in the sample so obtained, and (c) comparing the amount of the marker polypeptide so determined with a known standard, so as to thereby determine whether the cell sample obtained from the subject possesses an abnormal amount of the marker polypeptide. Such marker polypeptides may be detected by immunohistochemical assays, dot-blot assays, ELISA and the like.

### Antibodies

[0297] Any type of antibody known in the art can be generated to bind specifically to an epitope of a “BREAST CANCER GENE” polypeptide. An antibody as used herein includes intact immuno-globulin molecules, as well as fragments thereof, such as Fab, F(ab)₂, and Fv, which are capable of binding an epitope of a “BREAST CANCER GENE” polypeptide. Typically, at least 6, 8, 10, or 12 contiguous amino acids are required to form an epitope. However, epitopes which involve non-contiguous amino acids may require more, e.g., at least 15, 25, or 50 amino acids.

[0298] An antibody which specifically binds to an epitope of a “BREAST CANCER GENE” polypeptide can be used therapeutically, as well as in immunochemical assays, such as Western blots, ELISAs, radioimmunoassays, immunohistochemical assays, immunoprecipitations, or other immuno-chemical assays known in the art. Various immunoassays can be used to identify antibodies having the desired specificity. Numerous protocols for competitive binding or immunoradiometric assays are well known in the art. Such immunoassays typically involve the measurement of complex formation between an immunogen and an antibody which specifically binds to the immunogen.

[0299] Typically, an antibody which specifically binds to a “BREAST CANCER GENE” polypeptide provides a detection signal at least 5-, 10-, or 20-fold higher than a detection signal provided with other proteins when used in an immunochemical assay. Preferably, antibodies which specifically bind to “BREAST CANCER GENE” polypeptides do not detect other proteins in immunochemical assays and can immunoprecipitate a “BREAST CANCER GENE” polypeptide from solution.

[0300] “BREAST CANCER GENE” polypeptides can be used to immunize a mammal, such as a mouse, rat, rabbit, guinea pig, monkey, or human, to produce polyclonal antibodies. If desired, a “BREAST CANCER GENE” polypeptide can be conjugated to a carrier protein, such as bovine serum albumin, thyroglobulin, and keyhole limpet hemocyanin. Depending on the host species, various adjuvants can be used to increase the immunological response. Such adjuvants include, but are not limited to, Freund's adjuvant, mineral gels (e.g., aluminum hydroxide), and surface active substances (e.g. lysolecithin, pluronic polyols, polyanions, peptides, oil emulsions, keyhole limpet hemocyanin, and dinitrophenol). Among adjuvants used in humans, BCG (bacilli Calmette-Guerin) and Corynebacterium parvum are especially useful.

[0301] Monoclonal antibodies which specifically bind to a “BREAST CANCER GENE” polypeptide can be prepared using any technique which provides for the production of antibody molecules by continuous cell lines in culture. These techniques include, but are not limited to, the hybridoma technique, the human B cell hybridoma technique, and the EBV hybridoma technique [Kohler et al., 1985, (65); Kozbor et al., 1985, (66); Cote et al., 1983, (67) and Cole et al., 1984, (68)].

[0302] In addition, techniques developed for the production of chimeric antibodies, the splicing of mouse antibody genes to human antibody genes to obtain a molecule with appropriate antigen specificity and biological activity, can be used [Morrison et al., 1984, (69); Neuberger et al., 1984, (70); Takeda et al., 1985, (71)]. Monoclonal and other antibodies also can be humanized to prevent a patient from mounting an immune response against the antibody when it is used therapeutically. Such antibodies may be sufficiently similar in sequence to human antibodies to be used directly in therapy or may require alteration of a few key residues. Sequence differences between rodent antibodies and human sequences can be minimized by replacing residues which differ from those in the human sequences by site directed mutagenesis of individual residues or by grating of entire complementarity determining regions. Alternatively, humanized antibodies can be produced using recombinant methods, as described in GB2188638B. Antibodies which specifically bind to a “BREAST CANCER GENE” polypeptide can contain antigen binding sites which are either partially or fully humanized, as disclosed in U.S. Pat. No. 5,565,332.

[0303] Alternatively, techniques described for the production of single chain antibodies can be adapted using methods known in the art to produce single chain antibodies which specifically bind to “BREAST CANCER GENE” polypeptides. Antibodies with related specificity, but of distinct idiotypic composition, can be generated by chain shuffling from random combinatorial immunoglobulin libraries [Burton, 1991, (72)].

[0304] Single-chain antibodies also can be constructed using a DNA amplification method, such as PCR, using hybridoma cDNA as a template [Thirion et al., 1996, (73)]. Single-chain antibodies can be mono- or bispecific, and can be bivalent or tetravalent. Construction of tetravalent, bispecific single-chain antibodies is taught, for example, in Coloma & Morrison, (74). Construction of bivalent, bispecific single-chain antibodies is taught in Mallender & Voss, (75).

[0305] A nucleotide sequence encoding a single-chain antibody can be constructed using manual or automated nucleotide synthesis, cloned into an expression construct using standard recombinant DNA methods, and introduced into a cell to express the coding sequence, as described below. Alternatively, single-chain antibodies can be produced directly using, for example, filamentous phage technology [Verhaar et al., 1995, (76); Nicholls et al., 1993, (77)].

[0306] Antibodies which specifically bind to “BREAST CANCER GENE” polypeptides also can be produced by inducing in vivo production in the lymphocyte population or by screening immunoglobulin libraries or panels of highly specific binding reagents as disclosed in the literature [Orlandi et al., 1989, (789) and Winter et al., 1991, (79)].

[0307] Other types of antibodies can be constructed and used therapeutically in methods of the invention. For example, chimeric antibodies can be constructed as disclosed in WO 93/03151. Binding proteins which are derived from immunoglobulins and which are multivalent and multispecific, such as the antibodies described in WO 94/13804, also can be prepared.

[0308] Antibodies according to the invention can be purified by methods well known in the art. For example, antibodies can be affinity purified by passage over a column to which a “BREAST CANCER GENE” polypeptide is bound. The bound antibodies can then be eluted from the column using a buffer with a high salt concentration.

[0309] Immunoassays are commonly used to quantify the levels of proteins in cell samples, and many other immunoassay techniques are known in the art. The invention is not limited to a particular assay procedure, and therefore is intended to include both homogeneous and heterogeneous procedures. Exemplary immunoassays which can be conducted according to the invention include fluorescence polarisation immunoassay (FPIA), fluorescence immunoassay (FIA), enzyme immunoassay (EIA), nephelometric inhibition immunoassay (NIA), enzyme linked immunosorbent assay (ELISA), and radioimmunoassay (RIA). An indicator moiety, or label group, can be attached to the subject antibodies and is selected so as to meet the needs of various uses of the method which are often dictated by the availability of assay equipment and compatible immunoassay procedures. General techniques to be used in performing the various immunoassays noted above are known to those of ordinary skill in the art.

[0310] Other methods to quantify the level of a particular protein, or a protein fragment, or modified protein in a particular sample are based on flow-cytometric methods. Flow cytometry allows the identification of proteins on the cell surface as well as of intracellular proteins using fluorochrome labeled, protein specific antibodies or non-labeled antibodies in combination with fluorochrome labeled secondary antibodies. General techniques to be used in performing flow cytometric assays noted above are known to those of ordinary skill in the art. A special method based on the same principles is the microsphere-based flow cytometric. Microsphere beads are labeled with precise quantities of fluorescent dye and particular antibodies. Such techniques are provided by Luminex Inc. WO 97/14028. In another embodiment the level of a particular protein or a protein fragment, or modified protein in a particular sample may be determined by 2D gel-electrophoresis and/or mass spectrometry. Determination of protein nature, sequence, molecular mass as well charge can be achieved in one detection step. Mass spectrometry can be performed with methods known to those with skills in the art as MALDI, TOF, or combinations of these.

[0311] In another embodiment, the level of the encoded product, i.e., the product encoded by any of the polynucleotide sequences of the SEQ ID NO: 1 to 165 and 472 to 491 or a sequence complementary thereto, in a biological fluid (e.g., blood or urine) of a patient may be determined as a way of monitoring the level of expression of the marker polynucleotide sequence in cells of that patient. Such a method would include the steps of obtaining a sample of a biological fluid from the patient, contacting the sample (or proteins from the sample) with an antibody specific for a encoded marker polypeptide, and determining the amount of immune complex formation by the antibody, with the amount of immune complex formation being indicative of the level of the marker encoded product in the sample. This determination is particularly instructive when compared to the amount of immune complex formation by the same antibody in a control sample taken from a normal individual or in one or more samples previously or subsequently obtained from the same person.

[0312] In another embodiment, the method can be used to determine the amount of marker polypeptide present in a cell, which in turn can be correlated with progression of the disorder, e.g., plaque formation. The level of the marker polypeptide can be used predictively to evaluate whether a sample of cells contains cells which are, or are predisposed towards becoming, plaque associated cells. The observation of marker polypeptide level can be utilized in decisions regarding, e.g., the use of more stringent therapies.

[0313] As set out above, one aspect of the present invention relates to diagnostic assays for determining, in the context of cells isolated from a patient, if the level of a marker polypeptide is significantly reduced in the sample cells. The term “significantly reduced” refers to a cell phenotype wherein the cell possesses a reduced cellular amount of the marker polypeptide relative to a normal cell of similar tissue origin. For example, a cell may have less than about 50%, 25%, 10%, or 5% of the marker polypeptide that a normal control cell. In particular, the assay evaluates the level of marker polypeptide in the test cells, and, preferably, compares the measured level with marker polypeptide detected in at least one control cell, e.g., a normal cell and/or a transformed cell of known phenotype.

[0314] Of particular importance to the subject invention is the ability to quantify the level of marker polypeptide as determined by the number of cells associated with a normal or abnormal marker polypeptide level. The number of cells with a particular marker polypeptide phenotype may then be correlated with patient prognosis. In one embodiment of the invention, the marker polypeptide phenotype of the lesion is determined as a percentage of cells in a biopsy which are found to have abnormally high/low levels of the marker polypeptide. Such expression may be detected by immunohistochemical assays, dot-blot assays, ELISA and the like.

### Immunohistochemistry

[0315] Where tissue samples are employed, immunohistochemical staining may be used to determine the number of cells having the marker polypeptide phenotype. For such staining, a multiblock of tissue is taken from the biopsy or other tissue sample and subjected to proteolytic hydrolysis, employing such agents as protease K or pepsin. In certain embodiments, it may be desirable to isolate a nuclear fraction from the sample cells and detect the level of the marker polypeptide in the nuclear fraction.

[0316] The tissues samples are fixed by treatment with a reagent such as formalin, glutaraldehyde, methanol, or the like. The samples are then incubated with an antibody, preferably a monoclonal antibody, with binding specificity for the marker polypeptides. This antibody may be conjugated to a Label for subsequent detection of binding. samples are incubated for a time Sufficient for formation of the immunocomplexes. Binding of the antibody is then detected by virtue of a Label conjugated to this antibody. Where the antibody is unlabelled, a second labeled antibody may be employed, e.g., which is specific for the isotype of the anti-marker polypeptide antibody. Examples of labels which may be employed include radionuclides, fluorescence, chemoluminescence, and enzymes.

[0317] Where enzymes are employed, the Substrate for the enzyme may be added to the samples to provide a colored or fluorescent product. Examples of suitable enzymes for use in conjugates include horseradish peroxidase, alkaline phosphatase, malate dehydrogenase and the like. Where not commercially available, such antibody-enzyme conjugates are readily produced by techniques known to those skilled in the art.

[0318] In one embodiment, the assay is performed as a dot blot assay. The dot blot assay finds particular application where tissue samples are employed as it allows determination of the average amount of the marker polypeptide associated with a Single cell by correlating the amount of marker polypeptide in a cell-free extract produced from a predetermined number of cells.

[0319] In yet another embodiment, the invention contemplates using a panel of antibodies which are generated against the marker polypeptides of this invention, which polypeptides are encoded by any of the polynucleotide sequences of the SEQ ID NO: 1 to 165 and 472 to 491. Such a panel of antibodies may be used as a reliable diagnostic probe for breast cancer. The assay of the present invention comprises contacting a biopsy sample containing cells, e.g., macrophages, with a panel of antibodies to one or more of the encoded products to determine the presence or absence of the marker polypeptides.

[0320] The diagnostic methods of the subject invention may also be employed as follow-up to treatment, e.g., quantification of the level of marker polypeptides may be indicative of the effectiveness of current or previously employed therapies for malignant neoplasia and breast cancer in particular as well as the effect of these therapies upon patient prognosis.

[0321] The diagnostic assays described above can be adapted to be used as prognostic assays, as well. Such an application takes advantage of the sensitivity of the assays of the Invention to events which take place at characteristic stages in the progression of plaque generation in case of malignant neoplasia. For example, a given marker gene may be up- or down-regulated at a very early stage, perhaps before the cell is developing into a foam cell, while another marker gene may be characteristically up or down regulated only at a much later stage. Such a method could involve the steps of contacting the mRNA of a test cell with a polynucleotide probe derived from a given marker polynucleotide which is expressed at different characteristic levels in breast cancer tissue cells at different stages of malignant neoplasia progression, and determining the approximate amount of hybridization of the probe to the mRNA of the cell, such amount being an indication of the level of expression of the gene in the cell, and thus an indication of the stage of disease progression of the cell; alternatively, the assay can be carried out with an antibody specific for the gene product of the given marker polynucleotide, contacted with the proteins of the test cell. A battery of such tests will disclose not only the existence of a certain neoplastic lesion, but also will allow the clinician to select the mode of treatment most appropriate for the disease, and to predict the likelihood of success of that treatment.

[0322] The methods of the invention can also be used to follow the clinical course of a given breast cancer predisposition. For example, the assay of the Invention can be applied to a blood sample from a patient; following treatment of the patient for BREAST CANCER, another blood sample is taken and the test repeated. Successful treatment will result in removal of demonstrate differential expression, characteristic of the breast cancer tissue cells, perhaps approaching or even surpassing normal levels.

### Polypeptide Activity

[0323] In one embodiment the present invention provides a method for screening potentially therapeutic agents which modulate the activity of one or more “BREAST CANCER GENE” polypeptides, such that if the activity of the polypeptide is increased as a result of the upregulation of the “BREAST CANCER GENE” in a subject having or at risk for malignant neoplasia and breast cancer in particular, the therapeutic substance will decrease the activity of the polypeptide relative to the activity of the some polypeptide in a subject not having or not at risk for malignant neoplasia or breast cancer in particular but not treated with the therapeutic agent. Likewise, if the activity of the polypeptide as a result of the downregulation of the “BREAST CANCER GENE” is decreased in a subject having or at risk for malignant neoplasia or breast cancer in particular, the therapeutic agent will increase the activity of the polypeptide relative to the activity of the same polypeptide in a subject not having or not at risk for malignant neoplasia or breast cancer in particular, but not treated with the therapeutic agent.

[0324] The activity of the “BREAST CANCER GENE” polypeptides indicated in Table 2 or 3 may be measured by any means known to those of skill in the art, and which are particular for the type of activity performed by the particular polypeptide. Examples of specific assays which may be used to measure the activity of particular polynucleotides are shown below.

### a) G Protein Coupled Receptors

[0325] In one embodiment, the “BREAST CANCER GENE” polynucleotide may encode a G protein coupled receptor. In one embodiment, the present invention provides a method of screening potential modulators (inhibitors or activators) of the G protein coupled receptor by measuring changes in the activity of the receptor in the presence of a candidate modulator.

### 1) Gᵢ-Coupled Receptors

[0326] Cells (such as CHO cells or primary cells) are stably transfected with the relevant receptor and with an inducible CRE-luciferase construct. Cells are grown in 50% Dulbecco's modified Eagle medium/50% F12 (DMEM/F12) supplemented with 10% FBS, at 37° C. in a humidified atmosphere with 10% CO₂ and are routinely split at a ratio of 1:10 every 2 or 3 days. Test cultures are seeded into 384-well plates at an appropriate density (e.g. 2000 cells/well in 35 μl cell culture medium) in DMEM/F12 with FBS, and are grown for 48 hours (range: ˜24-60 hours, depending on cell line). Growth medium is then exchanged against serum free medium (SFM; e.g. Ultra-CHO), containing 0.1% BSA. Test compounds dissolved in DMSO are diluted in SFM and transferred to the test cultures (maximal final concentration 10 μmolar), followed by addition of forskolin (˜1 μmolar, final conc.) in SFM+0.1% BSA 10 minutes later. In case of antagonist screening both, an appropriate concentration of agonist, and forskolin are added. The plates are incubated at 37° C. in 10% CO₂ for 3 hours. Then the supernatant is removed, cells are lysed with lysis reagent (25 mmolar phosphate-buffer, pH 7.8, containing 2 mmolar DDT, 10% glycerol and 3% Triton X100). The luciferase reaction is started by addition of substrate-buffer (e.g. luciferase assay reagent, Promega) and luminescence is immediately determined (e.g. Berthold luminometer or Hamamatzu camera system).

### 2) Gᵢ-Coupled Receptors

[0327] Cells (such as CHO cells or primary cells) are stably transfected with the relevant receptor and with an inducible CRE-luciferase construct. Cells are grown in 50% Dulbecco's modified Eagle medium/50% F12 (DMEM/F12) supplemented with 10% FBS, at 37° C. in a humidified atmosphere with 10% CO₂ and are routinely split at a ratio of 1:10 every 2 or 3 days. Test cultures are seeded into 384-well plates at an appropriate density (e.g. 1000 or 2000 cells/well in 35 μl cell culture medium) in DMEM/F12 with FBS, and are grown for 48 hours (range: ˜24-60 hours, depending on cell line). The assay is started by addition of test-compounds in serum free medium (SFM; e.g. Ultra-CHO) containing 0.1% BSA: Test compounds are dissolved in DMSO, diluted in SFM and transferred to the test cultures (maximal final concentration 10 μmolar, DMSO conc.<0.6%). In case of antagonist screening an appropriate concentration of agonist is added 5-10 minutes later. The plates are incubated at 37° C. in 10% CO₂ for 3 hours. Then the cells are lysed with 10 μl lysis reagent per well (25 mmolar phosphate-buffer, pH 7.8, containing 2 mmolar DDT, 10% glycerol and 3% Triton X100) and the luciferase reaction is started by addition of 20 μl substrate-buffer per well (e.g. luciferase assay reagent, Promega). Measurement of luminescence is started immediately (e.g. Berthold luminometer or Hamamatzu camera system).

### 3) G_{q}-Coupled Receptors

[0328] Cells (such as CHO cells or primary cells) are stably transfected with the relevant receptor. Cells expressing functional receptor protein are grown in 50% Dulbecco's modified Eagle medium/50% F12 (DMEM/F12) supplemented with 10% FBS, at 37° C. in a humidified atmosphere with 5% CO₂ and are routinely split at a cell line dependent ratio every 3 or 4 days. Test cultures are seeded into 384-well plates at an appropriate density (e.g. 2000 cells I well in 35 μl cell culture medium) in DMEM/F12 with FBS, and are grown for 48 hours (range: ˜24-60 hours, depending on cell line). Growth medium is then exchanged against physiological salt solution (e.g. Tyrode solution). Test compounds dissolved in DMSO are diluted in Tyrode solution containing 0.1% BSA and transferred to the test cultures (maximal final concentration 10 μmolar). After addition of the receptor specific agonist the resulting Gq-mediated intracellular calcium increase is measured using appropriate read-out systems (e.g. calcium-sensitive dyes).

### b) Ion Channels

[0329] Ion channels are integral membrane proteins involved in electrical signaling, transmembrane signal transduction, and electrolyte and solute transport. By forming macromolecular pores through the membrane lipid bilayer, ion channels account for the flow of specific ion species driven by the electrochemical potential gradient for the permeating ion. At the single molecule level, individual channels undergo conformational transitions (“gating”) between the ‘open’ (ion conducting) and ‘closed’ (non conducting) state. Typical single channel openings last for a few milliseconds and result in elementary transmembrane currents in the range of 10⁻⁹-10⁻¹² Ampere. Channel gating is controlled by various chemical and/or biophysical parameters, such as neurotransmitters and intracellular second messengers (‘ligand-gated’ channels) or membrane potential (‘voltage-gated’ channels). Ion channels are functionally characterized by their ion selectivity, gating properties, and regulation by hormones and pharmacological agents. Because of their central role in signaling and transport processes, ion channels present ideal targets for pharmacological therapeutics in various pathophysiological settings.

[0330] In one embodiment, the “BREAST CANCER GENE” may encode an ion channel. In one embodiment, the present invention provides a method of screening potential activators or inhibitors of channels activity of the “BREAST CANCER GENE” polypeptide. Screening for compounds interaction with ion channels to either inhibit or promote their activity can be based on (1.) binding and (2.) functional assays in living cells [Hille (112)].
[0331] 1. For ligand-gated channels, e.g. ionotropic neurotransmitter/hormone receptors, assays can be designed detecting binding to the target by competition between the compound and a labeled ligand.
[0332] 2. Ion channel function can be tested functionally in living cells. Target proteins are either expressed endogenously in appropriate reporter cells or are introduced recombinantly. Channel activity can be monitored by (2.1) concentration changes of the permeating ion (most prominently Ca²⁺ ions), (2.2) by changes in the transmembrane electrical potential gradient, and (2.3) by measuring a cellular response (e.g. expression of a reporter gene, secretion of a neurotransmitter) triggered or modulated by the target activity.
   [0333] 2.1 Channel activity results in transmembrane ion fluxes. Thus activation of ionic channels can be monitored by the resulting changes in intracellular ion concentrations using luminescent or fluorescent indicators. Because of its wide dynamic range and availability of suitable indicators this applies particularly to changes in intracellular Ca²⁺ ion concentration ([Ca²⁺]ᵢ). [Ca²⁺]; can be measured, for example, by aequorin luminescence or fluorescence dye technology (e.g. using Fluo-3, Indo-1, Fura-2). Cellular assays can be designed where either the Ca²⁺ flux through the target channel itself is measured directly or where modulation of the target channel affects membrane potential and thereby the activity of co-expressed voltage-gated Ca²⁺ channels.
   [0334] 2.2 Ion channel currents result in changes of electrical membrane potential (Vₘ) which can be monitored directly using potentiometric fluorescent probes. These electrically charged indicators (e.g. the anionic oxonol dye DiBAC₄(3)) redistribute between extra- and intracellular compartment in response to voltage changes. The equilibrium distribution is governed by the Nernst-equation. Thus changes in membrane potential results in concomitant changes in cellular fluorescence. Again, changes in Vₘ might be caused directly by the activity of the target ion channel or through amplification and/or prolongation of the signal by channels co-expressed in the same cell.
   [0335] 2.3 Target channel activity can cause cellular Ca²⁺ entry either directly or through activation of additional Ca²⁺ channel (see 2.1). The resulting intracellular Ca²⁺ signals regulate a variety of cellular responses, e.g. secretion or gene transcription. Therefore modulation of the target channel can be detected by monitoring secretion of a known hormone/transmitter from the target-expressing cell or through expression of a reporter gene (e.g. luciferase) controlled by an Ca²⁺-responsive promoter element (e.g. cyclic AMP/Ca²⁺-responsive elements; CRE).

### c) DNA-Binding Proteins and Transcription Factors

[0336] In one embodiment, the “BREAST CANCER GENE” may encode a DNA-binding protein or a transcription factor. The activity of such a DNA-binding protein or a transcription factor may be measured, for example, by a promoter assay which measures the ability of the DNA-binding protein or the transcription factor to initiate transcription of a test sequence linked to a particular promoter. In one embodiment, the present invention provides a method of screening test compounds for its ability to modulate the activity of such a DNA-binding protein or a transcription factor by measuring the changes in the expression of a test gene which is regulated by a promoter which is responsive to the transcription factor.

### Promotor Assays

[0337] A promoter assay was set up with a human hepatocellular carcinoma cell HepG2 that was stably transfected with a luciferase gene under the control of a gene of interest (e.g. thyroid hormone) regulated promoter. The vector 2×IROluc, which was used for transfection, carries a thyroid hormone responsive element (TRE) of two 12 bp inverted palindromes separated by an 8 bp spacer in front of a tk minimal promoter and the luciferase gene. Test cultures were seeded in 96 well plates in serum-free Eagle's Minimal Essential Medium supplemented with glutamine, tricine, sodium pyruvate, non-essential amino acids, insulin, selen, transferrin, and were cultivated in a humidified atmosphere at 10% CO₂ at 37° C. After 48 hours of incubation serial dilutions of test compounds or reference compounds (L-T3, L-T4 e.g.) and co-stimulator if appropriate (final concentration 1 nM) were added to the cell cultures and incubation was continued for the optimal time (e.g. another 4-72 hours). The cells were then lysed by addition of buffer containing Triton X100 and luciferin and the luminescence of luciferase induced by T3 or other compounds was measured in a luminometer. For each concentration of a test compound replicates of 4 were tested. EC₅₀-values for each test compound were calculated by use of the Graph Pad Prism Scientific software.

### Screening Methods

[0338] The invention provides assays for screening test compounds which bind to or modulate the activity of a “BREAST CANCER GENE” polypeptide or a “BREAST CANCER GENE” polynucleotide. A test compound preferably binds to a “BREAST CANCER GENE” polypeptide or polynucleotide. More preferably, a test compound decreases or increases “BREAST CANCER GENE” activity by at least about 10, preferably about 50, more preferably about 75, 90, or 100% relative to the absence of the test compound.

### Test Compounds

[0339] Test compounds can be pharmacological agents already known in the art or can be compounds previously unknown to have any pharmacological activity. The compounds can be naturally occurring or designed in the laboratory. They can be isolated from microorganisms, animals, or plants, and can be produced recombinant, or synthesised by chemical methods known in the art. If desired, test compounds can be obtained using any of the numerous combinatorial library methods known in the art, including but not limited to, biological libraries, spatially addressable parallel solid phase or solution phase libraries, synthetic library methods requiring deconvolution, the one-bead one-compound library method, and synthetic library methods using affinity chromatography selection. The biological library approach is limited to polypeptide libraries, while the other four approaches are applicable to polypeptide, non-peptide oligomer, or small molecule libraries of compounds. [For review see Lam, 1997, (80)].

[0340] Methods for the synthesis of molecular libraries are well known in the art [see, for example, DeWitt et al., 1993, (81); Erb et al., 1994, (82); Zuckermann et al., 1994, (83); Cho et al., 1993, (84); Carell et al., 1994, (85) and Gallop et al., 1994, (86). Libraries of compounds can be presented in solution [see, e.g., Houghten, 1992, (87)], or on beads [Lam, 1991, (88)], DNA-chips [Fodor, 1993, (89)], bacteria or spores (Ladner, U.S. Pat. No. 5,223,409), plasmids [Cull et al., 1992, (901)], or phage [Scott & Smith, 1990, (91); Devlin, 1990, (92); Cwirla et al., 1990, (93); Felici, 1991, (94)].

[0341] High Throughput Screening

[0342] Test compounds can be screened for the ability to bind to “BREAST CANCER GENE” polypeptides or polynucleotides or to affect “BREAST CANCER GENE” activity or “BREAST CANCER GENE” expression using high throughput screening. Using high throughput screening, many discrete compounds can be tested in parallel so that large numbers of test compounds can be quickly screened. The most widely established techniques utilize 96-well, 384-well or 1536-well microtiter plates. The wells of the microtiter plates typically require assay volumes that range from 5 to 500 μl. In addition to the plates, many instruments, materials, pipettors, robotics, plate washers, and plate readers are commercially available to fit the microwell formats.

[0343] Alternatively, free format assays, or assays that have no physical barrier between samples, can be used. For example, an assay using pigment cells (melanocytes) in a simple homogeneous assay for combinatorial peptide libraries is described by Jayawickreme et al., (95). The cells are placed under agarose in culture dishes, then beads that carry combinatorial compounds are placed on the surface of the agarose. The combinatorial compounds are partially released the compounds from the beads. Active compounds can be visualised as dark pigment areas because, as the compounds diffuse locally into the gel matrix, the active compounds cause the cells to change colors.

[0344] Another example of a free format assay is described by Chelsky, (96). Chelsky placed a simple homogenous enzyme assay for carbonic anhydrase inside an agarose gel such that the enzyme in the gel would cause a color change throughout the gel. Thereafter, beads carrying combinatorial compounds via a photolinker were placed inside the gel and the compounds were partially released by UV light. Compounds that inhibited the enzyme were observed as local zones of inhibition having less color change.

[0345] In another example, combinatorial libraries were screened for compounds that had cytotoxic effects on cancer cells growing in agar [Salmon et al., 1996, (97)].

[0346] Another high throughput screening method is described in Beutel et al., U.S. Pat. No. 5,976,813. In this method, test samples are placed in a porous matrix. One or more assay components are then placed within, on top of, or at the bottom of a matrix such as a gel, a plastic sheet, a filter, or other form of easily manipulated solid support. When samples are introduced to the porous matrix they diffuse sufficiently slowly, such that the assays can be performed without the test samples running together.

### Binding Assays

[0347] For binding assays, the test compound is preferably a small molecule which binds to and occupies, for example, the ATP/GTP binding site of the enzyme or the active site of a “BREAST CANCER GENE” polypeptide, such that normal biological activity is prevented. Examples of such small molecules include, but are not limited to, small peptides or peptide-like molecules.

[0348] In binding assays, either the test compound or a “BREAST CANCER GENE” polypeptide can comprise a detectable label, such as a fluorescent, radioisotopic, chemiluminescent, or enzymatic label, such as horseradish peroxidase, alkaline phosphatase, or luciferase. Detection of a test compound which is bound to a “BREAST CANCER GENE” polypeptide can then be accomplished, for example, by direct counting of radioemmission, by scintillation counting, or by determining conversion of an appropriate substrate to a detectable product.

[0349] Alternatively, binding of a test compound to a “BREAST CANCER GENE” polypeptide can be determined without labeling either of the interactants. For example, a microphysiometer can be used to detect binding of a test compound with a “BREAST CANCER GENE” polypeptide. A microphysiometer (e.g., CytosensorJ) is an analytical instrument that measures the rate at which a cell acidifies its environment using a light-addressable potentiometric sensor (LAPS). Changes in this acidification rate can be used as an indicator of the interaction between a test compound and a “BREAST CANCER GENE” polypeptide [McConnell et al., 1992, (98)].

[0350] Determining the ability of a test compound to bind to a “BREAST CANCER GENE” polypeptide also can be accomplished using a technology such as real-time Bimolecular Interaction Analysis (BIA) [Sjolander & Urbaniczky, 1991, (99), and Szabo et al., 1995, (100)]. BIA is a technology for studying biospecific interactions in real time, without labeling any of the interactants (e.g., BIAcore™). Changes in the optical phenomenon surface plasmon resonance (SPR) can be used as an indication of real-time reactions between biological molecules.

[0351] In yet another aspect of the invention, a “BREAST CANCER GENE” polypeptide can be used as a “bait protein” in a two-hybrid assay or three-hybrid assay [see, e.g., U.S. Pat. No. 5,283,317; Zervos et al., 1993, (101); Madura et al., 1993, (102); Bartel et al., 1993, (1034); Iwabuchi et al., 1993, (104) and Brent WO 94/10300], to identify other proteins which bind to or interact with the “BREAST CANCER GENE” polypeptide and modulate its activity.

[0352] The two-hybrid system is based on the modular nature of most transcription factors, which consist of separable DNA-binding and activation domains. Briefly, the assay utilizes two different DNA constructs. For example, in one construct, polynucleotide encoding a “BREAST CANCER GENE” polypeptide can be fused to a polynucleotide encoding the DNA binding domain of a known transcription factor (e.g., GAL4). In the other construct a DNA sequence that encodes an unidentified protein (“prey” or “sample”) can be fused to a polynucleotide that codes for the activation domain of the known transcription factor. If the “bait” and the “prey” proteins are able to interact in vivo to form an protein-dependent complex, the DNA-binding and activation domains of the transcription factor are brought into close proximity. This proximity allows transcription of a reporter gene (e.g., LacZ), which is operably linked to a transcriptional regulatory site responsive to the transcription factor. Expression of the reporter gene can be detected, and cell colonies containing the functional transcription factor can be isolated and used to obtain the DNA sequence encoding the protein which interacts with the “BREAST CANCER GENE” polypeptide.

[0353] It may be desirable to immobilize either a “BREAST CANCER GENE” polypeptide (or polynucleotide) or the test compound to facilitate separation of bound from unbound forms of one or both of the interactants, as well as to accommodate automation of the assay. Thus, either a “BREAST CANCER GENE” polypeptide (or polynucleotide) or the test compound can be bound to a solid support. Suitable solid supports include, but are not limited to, glass or plastic slides, tissue culture plates, microtiter wells, tubes, silicon chips, or particles such as beads (including, but not limited to, latex, polystyrene, or glass beads). Any method known in the art can be used to attach a “BREAST CANCER GENE” polypeptide (or polynucleotide) or test compound to a solid support, including use of covalent and non-covalent linkages, passive absorption, or pairs of binding moieties attached respectively to the polypeptide (or polynucleotide) or test compound and the solid support. Test compounds are preferably bound to the solid support in an array, so that the location of individual test compounds can be tracked. Binding of a test compound to a “BREAST CANCER GENE” polypeptide (or polynucleotide) can be accomplished in any vessel suitable for containing the reactants. Examples of such vessels include microtiter plates, test tubes, and microcentrifuge tubes.

[0354] In one embodiment, a “BREAST CANCER GENE” polypeptide is a fusion protein comprising a domain that allows the “BREAST CANCER GENE” polypeptide to be bound to a solid support. For example, glutathione S-transferase fusion proteins can be adsorbed onto glutathione sepharose beads (Sigma Chemical, St. Louis, Mo.) or glutathione derivatized microtiter plates, which are then combined with the test compound or the test compound and the nonadsorbed “BREAST CANCER GENE” polypeptide; the mixture is then incubated under conditions conducive to complex formation (e.g., at physiological conditions for salt and pH). Following incubation, the beads or microtiter plate wells are washed to remove any unbound components. Binding of the interactants can be determined either directly or indirectly, as described above. Alternatively, the complexes can be dissociated from the solid support before binding is determined.

[0355] Other techniques for immobilising proteins or polynucleotides on a solid support also can be used in the screening assays of the invention. For example, either a “BREAST CANCER GENE” polypeptide (or polynucleotide) or a test compound can be immobilized utilizing conjugation of biotin and streptavidin. Biotinylated “BREAST CANCER GENE” polypeptides (or polynucleotides) or test compounds can be prepared from biotin NHS (N-hydroxysuccinimide) using techniques well known in the art (e.g., biotinylation kit, Pierce Chemicals, Rockford, Ill.) and immobilized in the wells of streptavidin-coated 96 well plates (Pierce Chemical). Alternatively, antibodies which specifically bind to a “BREAST CANCER GENE” polypeptide, polynucleotide, or a test compound, but which do not interfere with a desired binding site, such as the ATP/GTP binding site or the active site of the “BREAST CANCER GENE” polypeptide, can be derivatised to the wells of the plate. Unbound target or protein can be trapped in the wells by antibody conjugation.

[0356] Methods for detecting such complexes, in addition to those described above for the GST-immobilized complexes, include immunodetection of complexes using antibodies which specifically bind to a “BREAST CANCER GENE” polypeptide or test compound, enzyme-linked assays which rely on detecting an activity of a “BREAST CANCER GENE” polypeptide, and SDS gel electrophoresis under non-reducing conditions.

[0357] Screening for test compounds which bind to a “BREAST CANCER GENE” polypeptide or polynucleotide also can be carried out in an intact cell. Any cell which comprises a “BREAST CANCER GENE” polypeptide or polynucleotide can be used in a cell-based assay system. A “BREAST CANCER GENE” polynucleotide can be naturally occurring in the cell or can be introduced using techniques such as those described above. Binding of the test compound to a “BREAST CANCER GENE” polypeptide or polynucleotide is determined as described above.

### Modulation of Gene Expression

[0358] In another embodiment, test compounds which increase or decrease “BREAST CANCER GENE” expression are identified. A “BREAST CANCER GENE” polynucleotide is contacted with a test compound in an appropriate expression test system as described below or in a cell system, and the expression of an RNA or polypeptide product of the “BREAST CANCER GENE” polynucleotide is determined. The level of expression of appropriate mRNA or polypeptide in the presence of the test compound is compared to the level of expression of mRNA or polypeptide in the absence of the test compound. The test compound can then be identified as a modulator of expression based on this comparison. For example, when expression of mRNA or polypeptide is greater in the presence of the test compound than in its absence, the test compound is identified as a stimulator or enhancer of the mRNA or polypeptide expression. Alternatively, when expression of the mRNA or polypeptide is less in the presence of the test compound than in its absence, the test compound is identified as an inhibitor of the mRNA or polypeptide expression.

[0359] The level of “BREAST CANCER GENE” mRNA or polypeptide expression in the cells can be determined by methods well known in the art for detecting mRNA or polypeptide. Either qualitative or quantitative methods can be used. The presence of polypeptide products of a “BREAST CANCER GENE” polynucleotide can be determined, for example, using a variety of techniques known in the art, including immunochemical methods such as radioimmunoassay, Western blotting, and immunohistochemistry. Alternatively, polypeptide synthesis can be determined in vivo, in a cell culture, or in an in vitro translation system by detecting incorporation of labeled amino acids into a “BREAST CANCER GENE” polypeptide.

[0360] Such screening can be carried out either in a cell-free assay system or in an intact cell. Any cell which expresses a “BREAST CANCER GENE” polynucleotide can be used in a cell-based assay system. A “BREAST CANCER GENE” polynucleotide can be naturally occurring in the cell or can be introduced using techniques such as those described above. Either a primary culture or an established cell line, such as CHO or human embryonic kidney 293 cells, can be used.

### Therapeutic Indications and Methods

[0361] Therapies for treatment of breast cancer primarily relied upon effective chemotherapeutic drugs for intervention on the cell proliferation, cell growth or angiogenesis. The advent of genomics-driven molecular target identification has opened up the possibility of identifying new breast cancer-specific targets for therapeutic intervention that will provide safer, more effective treatments for malignant neoplasia patients and breast cancer patients in particular. Thus, newly discovered breast cancer-associated genes and their products can be used as tools to develop innovative therapies. The identification of the Her2/neu receptor kinase presents exciting new opportunities for treatment of a certain subset of tumor patients as described before. Genes playing important roles in any of the physiological processes outlined above can be characterized as breast cancer targets. Genes or gene fragments identified through genomics can readily be expressed in one or more heterologous expression systems to produce functional recombinant proteins. These proteins are characterized in vitro for their biochemical properties and then used as tools in high-throughput molecular screening programs to identify chemical modulators of their biochemical activities. Modulators of target gene expression or protein activity can be identified in this manner and subsequently tested in cellular and in vivo disease models for therapeutic activity. Optimization of lead compounds with iterative testing in biological models and detailed pharmacokinetic and toxicological analyses form the basis for drug development and subsequent testing in humans.

[0362] This invention further pertains to the use of novel agents identified by the screening assays described above. Accordingly, it is within the scope of this invention to use a test compound identified as described herein in an appropriate animal model. For example, an agent identified as described herein (e.g., a modulating agent, an antisense polynucleotide molecule, a specific antibody, ribozyme, or a human “BREAST CANCER GENE” polypeptide binding molecule) can be used in an animal model to determine the efficacy, toxicity, or side effects of treatment with such an agent. Alternatively, an agent identified as described herein can be used in an animal model to determine the mechanism of action of such an agent. Furthermore, this invention pertains to uses of novel agents identified by the above described screening assays for treatments as described herein.

[0363] A reagent which affects human “BREAST CANCER GENE” activity can be administered to a human cell, either in vitro or in vivo, to reduce or increase human “BREAST CANCER GENE” activity. The reagent preferably binds to an expression product of a human “BREAST CANCER GENE”. If the expression product is a protein, the reagent is preferably an antibody. For treatment of human cells ex vivo, an antibody can be added to a preparation of stem cells which have been removed from the body. The cells can then be replaced in the same or another human body, with or without clonal propagation, as is known in the art.

[0364] In one embodiment, the reagent is delivered using a liposome. Preferably, the liposome is stable in the animal into which it has been administered for at least about 30 minutes, more preferably for at least about 1 hour, and even more preferably for at least about 24 hours. A liposome comprises a lipid composition that is capable of targeting a reagent, particularly a polynucleotide, to a particular site in an animal, such as a human. Preferably, the lipid composition of the liposome is capable of targeting to a specific organ of an animal, such as the lung, liver, spleen, heart brain, lymph nodes, and skin.

[0365] A liposome useful in the present invention comprises a lipid composition that is capable of fusing with the plasma membrane of the targeted cell to deliver its contents to the cell. Preferably, the transfection efficiency of a liposome is about 0.5 μg of DNA per 16 nmol of liposome delivered to about 10⁶ cells, more preferably about 1.0 μg of DNA per 16 nmol of liposome delivered to about 10⁶ cells, and even more preferably about 2.0 μg of DNA per 16 nmol of liposome delivered to about 10⁶ cells. Preferably, a liposome is between about 100 and 500 nm, more preferably between about 150 and 450 nm, and even more preferably between about 200 and 400 nm in diameter.

[0366] Suitable liposomes for use in the present invention include those liposomes usually used in, for example, gene delivery methods known to those of skill in the art. More preferred liposomes include liposomes having a polycationic lipid composition and/or liposomes having a cholesterol backbone conjugated to polyethylene glycol. Optionally, a liposome comprises a compound capable of targeting the liposome to a particular cell type, such as a cell-specific ligand exposed on the outer surface of the liposome.

[0367] Complexing a liposome with a reagent such as an antisense oligonucleotide or ribozyme can be achieved using methods which are standard in the art (see, for example, U.S. Pat. No. 5,705,151). Preferably, from about 0.1 μg to about 10 μg of polynucleotide is combined with about 8 nmol of liposomes, more preferably from about 0.5 μg to about 5 μg of polynucleotides are combined with about 8 nmol liposomes, and even more preferably about 1.0 μg of polynucleotides is combined with about 8 nmol liposomes.

[0368] In another embodiment, antibodies can be delivered to specific tissues in vivo using receptor-mediated targeted delivery. Receptor-mediated DNA delivery techniques are taught in, for example, Findeis et al., 1993, (105); Chiou et al., 1994, (106); Wu & Wu, 1988, (107); Wu et al., 1994, (108); Zenke et al., 1990, (109); Wu et al., 1991, (110).

### Determination of a Therapeutically Effective Dose

[0369] The determination of a therapeutically effective dose is well within the capability of those skilled in the art. A therapeutically effective dose refers to that amount of active ingredient which increases or decreases human “BREAST CANCER GENE” activity relative to the human “BREAST CANCER GENE” activity which occurs in the absence of the therapeutically effective dose.

[0370] For any compound, the therapeutically effective dose can be estimated initially either in cell culture assays or in animal models, usually mice, rabbits, dogs, or pigs. The animal model also can be used to determine the appropriate concentration range and route of administration. Such information can then be used to determine useful doses and routes for administration in humans.

[0371] Therapeutic efficacy and toxicity, e.g., ED₅₀ (the dose therapeutically effective in 50% of the population) and LD₅₀ (the dose lethal to 50% of the population), can be determined by standard pharmaceutical procedures in cell cultures or experimental animals. The dose ratio of toxic to therapeutic effects is the therapeutic index, and it can be expressed as the ratio, LD₅₀/ED₅₀.

[0372] Pharmaceutical compositions which exhibit large therapeutic indices are preferred. The data obtained from cell culture assays and animal studies is used in formulating a range of dosage for human use. The dosage contained in such compositions is preferably within a range of circulating concentrations that include the ED₅₀ with little or no toxicity. The dosage varies within this range depending upon the dosage form employed, sensitivity of the patient, and the route of administration.

[0373] The exact dosage will be determined by the practitioner, in light of factors related to the subject that requires treatment. Dosage and administration are adjusted to provide sufficient levels of the active ingredient or to maintain the desired effect. Factors which can be taken into account include the severity of the disease state, general health of the subject, age, weight, and gender of the subject, diet, time and frequency of administration, drug combination(s), reaction sensitivities, and tolerance/response to therapy. Long-acting pharmaceutical compositions can be administered every 3 to 4 days, every week, or once every two weeks depending on the half-life and clearance rate of the particular formulation.

[0374] Normal dosage amounts can vary from 0.1 to 100,000 micrograms, up to a total dose of about 1 g, depending upon the route of administration. Guidance as to particular dosages and methods of delivery is provided in the literature and generally available to practitioners in the art. Those skilled in the art will employ different formulations for nucleotides than for proteins or their inhibitors. Similarly, delivery of polynucleotides or polypeptides will be specific to particular cells, conditions, locations, etc.

[0375] If the reagent is a single-chain antibody, polynucleotides encoding the antibody can be constructed and introduced into a cell either ex vivo or in vivo using well-established techniques including, but not limited to, transferrin-polycation-mediated DNA transfer, transfection with naked or encapsulated nucleic acids, liposome-mediated cellular fusion, intracellular transportation of DNA-coated latex beads, protoplast fusion, viral infection, electroporation, a gene gun, and DEAE- or calcium phosphate-mediated transfection.

[0376] Effective in vivo dosages of an antibody are in the range of about 5 μg to about 50 μg/kg, about 50 μg to about 5 mg/kg, about 100 μg to about 500 μg/kg of patient body weight, and about 200 to about 250 μg/kg of patient body weight. For administration of polynucleotides encoding single-chain antibodies, effective in vivo dosages are in the range of about 100 ng to about 200 ng, 500 ng to about 50 mg, about 1 μg to about 2 mg, about 5 μg to about 500 μg, and about 20 μg to about 100 μg of DNA.

[0377] If the expression product is mRNA, the reagent is preferably an antisense oligonucleotide or a ribozyme. Polynucleotides which express antisense oligonucleotides or ribozymes can be introduced into cells by a variety of methods, as described above.

[0378] Preferably, a reagent reduces expression of a “BREAST CANCER GENE” gene or the activity of a “BREAST CANCER GENE” polypeptide by at least about 10, preferably about 50, more preferably about 75, 90, or 100% relative to the absence of the reagent. The effectiveness of the mechanism chosen to decrease the level of expression of a “BREAST CANCER GENE” gene or the activity of a “BREAST CANCER GENE” polypeptide can be assessed using methods well known in the art, such as hybridization of nucleotide probes to “BREAST CANCER GENE”-specific mRNA, quantitative RT-PCR, immunologic detection of a “BREAST CANCER GENE” polypeptide, or measurement of “BREAST CANCER GENE” activity.

[0379] In any of the embodiments described above, any of the pharmaceutical compositions of the invention can be administered in combination with other appropriate therapeutic agents. Selection of the appropriate agents for use in combination therapy can be made by one of ordinary skill in the art, according to conventional pharmaceutical principles. The combination of therapeutic agents can act synergistically to effect the treatment or prevention of the various disorders described above. Using this approach, one may be able to achieve therapeutic efficacy with lower dosages of each agent, thus reducing the potential for adverse side effects.

[0380] Any of the therapeutic methods described above can be applied to any subject in need of such therapy, including, for example, birds and mammals such as dogs, cats, cows, pigs, sheep, goats, horses, rabbits, monkeys, and most preferably, humans.

[0381] All patents and patent applications cited in this disclosure are expressly incorporated herein by reference. The above disclosure generally describes the present invention. A more complete understanding can be obtained by reference to the following specific examples which are provided for purposes of illustration only and are not intended to limit the scope of the invention.

### Pharmaceutical Compositions

[0382] The invention also provides pharmaceutical compositions which can be administered to a patient to achieve a therapeutic effect. Pharmaceutical compositions of the invention can comprise, for example, a “BREAST CANCER GENE” polypeptide, “BREAST CANCER GENE” polynucleotide, ribozymes or antisense oligonucleotides, antibodies which specifically bind to a “BREAST CANCER GENE” polypeptide, or mimetics, agonists, antagonists, or inhibitors of a “BREAST CANCER GENE” polypeptide activity. The compositions can be administered alone or in combination with at least one other agent, such as stabilizing compound, which can be administered in any sterile, biocompatible pharmaceutical carrier, including, but not limited to, saline, buffered saline, dextrose, and water. The compositions can be administered to a patient alone, or in combination with other agents, drugs or hormones.

[0383] In addition to the active ingredients, these pharmaceutical compositions can contain suitable pharmaceutically acceptable carriers comprising excipients and auxiliaries which facilitate processing of the active compounds into preparations which can be used pharmaceutically. Pharmaceutical compositions of the invention can be administered by any number of routes including, but not limited to, oral, intravenous, intramuscular, intraarterial, intramedullary, intrathecal, intraventricular, transdermal, subcutaneous, intraperitoneal, intranasal, parenteral, topical, sublingual, or rectal means. Pharmaceutical compositions for oral administration can be formulated using pharmaceutically acceptable carriers well known in the art in dosages suitable for oral administration. Such carriers enable the pharmaceutical compositions to be formulated as tablets, pills, dragees, capsules, liquids, gels, syrups, slurries, suspensions, and the like, for ingestion by the patient.

[0384] Pharmaceutical preparations for oral use can be obtained through combination of active compounds with solid excipient, optionally grinding a resulting mixture, and processing the mixture of granules, after adding suitable auxiliaries, if desired, to obtain tablets or dragee cores. suitable excipients are carbohydrate or protein fillers, such as sugars, including lactose, sucrose, mannitol, or sorbitol; starch from corn, wheat, rice, potato, or other plants; cellulose, such as methyl cellulose, hydroxypropylmethylcellulose, or sodium carboxymethylcellulose; gums including arabic and tragacanth; and proteins such as gelatin and collagen. If desired, disintergrating or solubilizing agents can be added, such as the cross-linked polyvinyl pyrrolidone, agar, alginic acid, or a salt thereof, such as sodium alginate.

[0385] Dragee cores can be used in conjunction with suitable coatings, such as concentrated sugar solutions, which also can contain gum arabic, talc, polyvinylpyrrolidone, carbopol gel, polyethylene glycol, and/or titanium dioxide, lacquer solutions, and suitable organic solvents or solvent mixtures. Dyestuffs or pigments can be added to the tablets or dragee coatings for product identification or to characterize the quantity of active compound, i.e., dosage.

[0386] Pharmaceutical preparations which can be used orally include push-fit capsules made of gelatin, as well as soft, sealed capsules made of gelatin and a coating, such as glycerol or sorbitol. Push-fit capsules can contain active ingredients mixed with a filler or binders, such as lactose or starches, lubricants, such as talc or magnesium stearate, and, optionally, stabilizers. In soft capsules, the active compounds can be dissolved or suspended in suitable liquids, such as fatty oils, liquid, or liquid polyethylene glycol with or without stabilizers.

[0387] Pharmaceutical formulations suitable for parenteral administration can be formulated in aqueous solutions, preferably in physiologically compatible buffers such as Hanks' solution, Ringer's solution, or physiologically buffered saline. Aqueous injection suspensions can contain substances which increase the viscosity of the suspension, such as sodium carboxymethyl cellulose, sorbitol, or dextran. Additionally, suspensions of the active compounds can be prepared as appropriate oily injection suspensions. Suitable lipophilic solvents or vehicles include fatty oils such as sesame oil, or synthetic fatty acid esters, such as ethyl oleate or triglycerides, or liposomes. Non-lipid polycationic amino polymers also can be used for delivery. Optionally, the suspension also can contain suitable stabilizers or agents which increase the solubility of the compounds to allow for the preparation of highly concentrated solutions. For topical or nasal administration, penetrants appropriate to the particular barrier to be permeated are used in the formulation. Such penetrants are generally known in the art.

[0388] The pharmaceutical compositions of the present invention can be manufactured in a manner that is known in the art, e.g., by means of conventional mixing, dissolving, granulating, dragee making, levigating, emulsifying, encapsulating, entrapping, or lyophilizing processes. The pharmaceutical composition can be provided as a salt and can be formed with many acids, including but not limited to, hydrochloric, sulfuric, acetic, lactic, tartaric, malic, succinic, etc. Salts tend to be more soluble in aqueous or other protonic solvents than are the corresponding free base forms. In other cases, the preferred preparation can be a lyophilized powder which can contain any or all of the following: 150 mM histidine, 0.1%2% sucrose, and 27% mannitol, at a pH range of 4.5 to 5.5, that is combined with buffer prior to use.

[0389] Further details on techniques for formulation and administration can be found in the latest edition of REMINGTON'S PHARMACEUTICAL SCIENCES (111). After pharmaceutical compositions have been prepared, they can be placed in an appropriate container and labeled for treatment of an indicated condition. Such labeling would include amount, frequency, and method of administration.

[0390] One strategy for identifying genes that are involved in breast cancer is to detect genes that are expressed differentially under conditions associated with the disease versus non-disease or in the context of therapy response conditions. The sub-sections below describe a number of experimental systems which can be used to detect such differentially expressed genes. In general, these experimental systems include at least one experimental condition in which subjects or samples are treated in a manner associated with breast cancer, in addition to at least one experimental control condition lacking such disease associated treatment or does not respond to such treatment. Differentially expressed genes are detected, as described below, by comparing the pattern of gene expression between the experimental and control conditions.

[0391] Once a particular gene has been identified through the use of one such experiment, its expression pattern may be further characterized by studying its expression in a different experiment and the findings may be validated by an independent technique. Such use of multiple experiments may be useful in distinguishing the roles and relative importance of particular genes in breast cancer and the treatment thereof. A combined approach, comparing gene expression pattern in cells derived from breast cancer patients to those of in vitro cell culture models can give substantial hints on the pathways involved in development and/or progression of breast cancer. It can also elucidate the role of such genes in the development of resistance or insensitivity to certain therapeutic agents (e.g. chemotherapeutic drugs).

[0392] Among the experiments which may be utilized for the identification of differentially expressed genes involved in malignant neoplasia and breast cancer in particular, are experiments designed to analyze those genes which are involved in signal transduction. Such experiments may serve to identify genes involved in the proliferation of cells.

[0393] Below are methods described for the identification of genes which are involved in breast cancer. Such represent genes which are differentially expressed in breast cancer conditions relative to their expression in normal, or non-breast cancer conditions or upon experimental manipulation based on clinical observations. Such differentially expressed genes represent “target” and/or “marker” genes. Methods for the further characterization of such differentially expressed genes, and for their identification as target and/or marker genes, are presented below.

[0394] Alternatively, a differentially expressed gene may have its expression modulated, i.e., quantitatively increased or decreased, in normal versus breast cancer states, or under control versus experimental conditions. The degree to which expression differs in normal versus breast cancer or control versus experimental states need only be large enough to be visualized via standard characterization techniques, such as, for example, the differential display technique described below. Other such standard characterization techniques by which expression differences may be visualized include but are not limited to quantitative RT-PCR and Northern analyses, which are well known to those of skill in the art.

[0395] In Addition to the experiments described above the following describes algorithms and statistical analyses which can be utilized for data evaluation and for the classification as well as response prediction for a so far not classified biological sample in the context of control samples. Predictive algorithms and equations described below have already shown their power to subdivide individual cancers.

### EXAMPLE 1

### Expression Profiling Utilizing Quantitative Kinetic RT-PCR

[0396] For a detailed analysis of gene expression by quantitative PCR methods, one will utilize primers flanking the genomic region of interest and a fluorescent labeled probe hybridizing in-between. Using the PRISM 7700 Sequence Detection System of PE Applied Biosystems (Perkin Elmer, Foster City, Calif., USA) with the technique of a fluorogenic probe, consisting of an oligonucleotide labeled with both a fluorescent reporter dye and a quencher dye, one can perform such a expression measurement. Amplification of the probe-specific product causes cleavage of the probe, generating an increase in reporter fluorescence. Primers and probes were selected using the Primer Express software and localized mostly in the 3′ region of the coding sequence or in the 3′ untranslated region (see Table 5 for primer- and probe-sequences). All primer pairs were checked for specificity by conventional PCR reactions and gel electrophoresis. To standardize the amount of sample RNA, GAPDH was selected as a reference, since it was not differentially regulated in the samples analyzed. To perform such an expression analysis of genes within a biological samples the respective primer/probes are prepared by mixing 25 μl of the 100 μM stock solution “Upper Primer”, 25 μl of the 100 μM stock solution “Lower Primer” with 12.5 μl of the 100 μM stock solution TaqMan-probe (FAM/Tamra) and adjusted to 500 μl with aqua dest (Primer/probe-mix). For each reaction 1.25 μl cDNA of the patient samples were mixed with 8.75 μl nuclease-free water and added to one well of a 96 Well-Optical Reaction Plate (Applied Biosystems Part No. 4306737). 1.5 μl of the Primer/Probe-mix described above, 12.5 μl Taq Man Universal-PCR-mix (2×) (Applied Biosystems Part No. 4318157) and 1 μl Water are then added. The 96 well plates are closed with 8 Caps/Strips (Applied Biosystems Part Number 4323032) and centrifuged for 3 minutes. Measurements of the PCR reaction are done according to the instructions of the manufacturer with a TaqMan 7900 HT from Applied Biosystems (No. 20114) under appropriate conditions (2 min. 50° C., 10 min. 95° C., 0.15 min. 95° C., 1 min. 60° C.; 40 cycles). Prior to the measurement of so far unclassified biological samples control experiments will e.g. cell lines, healthy control samples, samples of defined therapy response could be used for standardization of the experimental conditions.

[0397] TaqMan validation experiments were performed showing that the efficiencies of the target and the control amplifications are approximately equal which is a prerequisite for the relative quantification of gene expression by the comparative ΔΔC_{T} method, known to those with skills in the art. Herefor the SoftwareSDS 2.0 from Applied Biosystems can be used according to the respective instructions. CT-values are then further analyzed with appropriate software (Microsoft Excel™) of statistical software packages (SAS).

[0398] As well as the technology described above, provided by Perkin Elmer, one may use other technique implementations like Lightcycler™ from Roche Inc. or iCycler from Stratagene Inc. capable of real time detection of an RT-PCR reaction.

### EXAMPLE 2

### Expression Profiling Utilizing DNA Microarrays

[0399] Expression profiling can bee carried out using the Affymetrix Array Technology. By hybridization of mRNA to such a DNA-array or DNA-Chip, it is possible to identify the expression value of each transcripts due to signal intensity at certain position of the array. Usually these DNA-arrays are produced by spotting of cDNA, oligonucleotides or subcloned DNA fragments. In case of Affymetrix technology app. 400.000 individual oligonucleotide sequences were synthesized on the surface of a silicon wafer at distinct positions. The minimal length of oligomers is 12 nucleotides, preferable 25 nucleotides or full length of the questioned transcript. Expression profiling may also be carried out by hybridization to nylon or nitro-cellulose membrane bound DNA or oligonucleotides. Detection of signals derived from hybridization may be obtained by either colorimetric, fluorescent, electrochemical, electronic, optic or by radioactive readout. Detailed description of array construction have been mentioned above and in other patents cited. To determine the quantitative and qualitative changes in the chromosomal region to analyze, RNA from tumor tissue which is suspected to contain such genomic alterations has to be compared to RNA extracted from benign tissue (e.g. epithelial breast tissue, or micro dissected ductal tissue) on the basis of expression profiles for the whole transcriptome. With minor modifications, the sample preparation protocol followed the Affymetrix GeneChip Expression Analysis Manual (Santa Clara, Calif.). Total RNA extraction and isolation from tumor or benign tissues, biopsies, cell isolates or cell containing body fluids can be performed by using TRIzol (Life Technologies, Rockville, Md.) and Oligotex mRNA Midi kit (Qiagen, Hilden, Germany), and an ethanol precipitation step should be carried out to bring the concentration to 1 mg/ml. Using 5-10 mg of mRNA to create double stranded cDNA by the SuperScript system (Life Technologies). First strand cDNA synthesis was primed with a T7-(dT24) oligonucleotide. The cDNA can be extracted with phenol/chloroform and precipitated with ethanol to a final concentration of 1 mg/ml. From the generated cDNA, cRNA can be synthesized using Enzo's (Enzo Diagnostics Inc., Farmingdale, N.Y.) in vitro Transcription Kit. Within the same step the cRNA can be labeled with biotin nucleotides Bio-11-CTP and Bio-16-UTP (Enzo Diagnostics Inc., Farmingdale, N.Y.). After labeling and cleanup (Qiagen, Hilden (Germany) the cRNA then should be fragmented in an appropriated fragmentation buffer (e.g., 40 mM Tris-Acetate, pH 8.1, 100 mM KOAc, 30 mM MgOAc, for 35 minutes at 94° C.). As per the Affymetrix protocol, fragmented cRNA should be hybridized on the HG_U133 arrays A and B, comprising app. 40.000 probed transcripts each, for 24 hours at 60 rpm in a 45° C. hybridization oven. After Hybridization step the chip surfaces have to be washed and stained with streptavidin phycoerythrin (SAPE; Molecular Probes, Eugene, Oreg.) in Affymetrix fluidics stations. To amplify staining, a second labeling step can be introduced, which is recommended but not compulsive. Here one should add SAPE solution twice with an antistreptavidin biotinylated antibody. Hybridization to the probe arrays may be detected by fluorometric scanning (Hewlett Packard Gene Array Scanner; Hewlett Packard Corporation, Palo Alto, Calif.).

[0400] After hybridization and scanning, the microarray images can be analyzed for quality control, looking for major chip defects or abnormalities in hybridization signal. Therefor either Affymetrix GeneChip MAS 5.0 Software or other microarray image analysis software can be utilized. Primary data analysis should be carried out by software provided by the manufacturer.

[0401] In case of the genes analyses in one embodiment of this invention the primary data have been analyzed by further bioinformatic tools and additional filter criteria. The bioinformatic analysis is described in detail below.

### EXAMPLE 3

### Data Analysis from Expression Profiling Experiments

[0402] According to Affymetrix measurement technique (Affymetrix GeneChip Expression Analysis Manual, Santa Clara, Calif.) a single gene expression measurement on one chip yields the average difference value and the absolute call. Each chip contains 16-20 oligonucleotide probe pairs per gene or cDNA clone. These probe pairs include perfectly matched sets and mismatched sets, both of which are necessary for the calculation of the average difference, or expression value, a measure of the intensity difference for each probe pair, calculated by subtracting the intensity of the mismatch from the intensity of the perfect match. This takes into consideration variability in hybridization among probe pairs and other hybridization artifacts that could affect the fluorescence intensities. The average difference is a numeric value supposed to represent the expression value of that gene. The absolute call can take the values ‘A’ (absent), ‘M’ (marginal), or ‘P’ (present) and denotes the quality of a single hybridization. We used both the quantitative information given by the average difference and the qualitative information given by the absolute call to identify the genes which are differentially expressed in biological samples from individuals with breast cancer versus biological samples from the normal population. With other algorithms than the Affymetrix one we have obtained different numerical values representing the same expression values and expression differences upon comparison.

[0403] The differential expression E in one of the breast cancer groups compared to the normal population is calculated as follows. Given n average difference values d₁, d₂, . . . , dₙ in the breast cancer population and m average difference values c₁, c₂, . . . , cₘ in the population of normal individuals, it is computed by the equation:

$$E ≡ exp ( \frac{1}{m} {\sum }_{i = 1}^{m} lm ( {c}_{i} ) - \frac{1}{n} {\sum }_{i = 1}^{n} ln ( {d}_{i} ) ) \qquad ( equation 1 )$$

[0404] If dⱼ<50 or cᵢ<50 for one or more values of i and j, these particular values cᵢ and/or dⱼ are set to an “artificial” expression value of 50. These particular computation of E allows for a correct comparison to TaqMan results.

[0405] A gene is called up-regulated in breast cancer versus normal if E≧minimal change factor given in Table 3 and if the number of absolute calls equal to ‘P’ in the breast cancer population is greater than n/2. The minimal fold change factors in Table 3 are given for those patient populations responding to a given chemotherapy (CR), non responding to a administered chemotherapy (NC) or those tissues without any pathological signs of a tumor (NB). Fold changes greater than 1 refers to an increase in gene expression in the first names tissue sample compared to the second. This regulation factors are mean values and may differ individually, here the combined profiles of all 185 genes listed in Table 1a and 1b in a cluster analysis or a principle component analysis will indicate the classification group for such sample.

[0406] According to the above, a gene is called down-regulated in breast cancer versus normal if E≦minimal change factor given in Table 3 and if the number of absolute calls equal to ‘P’ in the breast cancer population is greater than n/2. Values smaller than 1 describe an decreased expression of the given gene.

[0407] The minimal fold change factors given in Table 3 indicate also the relative up- and down-regulation of those gene indicative of tumor presence. These genes do show in the comparison of any tumor tissue to the normal healthy counterpart (NT) the highest increase or decrease factors (e.g. SEQ ID: 43, 55, 65, or 162)

[0408] The final list of differentially regulated genes consists of all up-regulated and all down-regulated genes in biological samples from individuals with breast cancer versus biological samples from the normal population or of an individual response pattern. Those genes on this list which are interesting for a diagnostic or pharmaceutical application were finally validated by quantitative real time RT-PCR (see Example 1). If a good correlation between the expression values/behavior of a transcript could be observed with both techniques, such a gene is listed in Tables 1 to 5.

### EXAMPLE 4

### Analysis of Differential Gene Expression Patterns Using Support Vector Machines

[0409] Support vector machines (SVM) are well suited for two-class or multi-class pattern recognition (Weston and Watkins, 1999 (115); Vapnik, 1995 (116); Vapnik, 1998 (117); Burges, 1998 (118).

[0410] For the two-class classification problem, (e.g. tumor tissue vs. non tumor tissue, or therapy response vs. non response) assume that we have a set of samples, i.e., a series of input vectors \vec{xᵢ}εR^{d} (i=1, 2, . . . , m)

with corresponding labels

yᵢε{+1,−1} (i=1, 2, . . . , m).

[0411] Here, +1 and −1 indicate the two classes. To classify gene expression patterns of marker genes from Table 1a and 1b or 2 for describing the current tumor status or probable response to a therapeutic agent, the input vector dimension is equal to the number of different oligonucleotide types present on the oligonucleotide array or a subset hereof, and each input vector unit stands for the hybridization value of one specific oligonucleotide type.

[0412] The goal is to construct a binary classifier or derive a decision function from the available samples which has a small probability of misclassifying a future sample.

[0413] An SVM implements the following idea: it maps the input vectors

\vec{xᵢ}εR^{d}

into a high-dimensional feature space

Φ(\vec{x})εH

and constructs an Optimal Separating Hyperplane (OSH), which maximizes the margin, the distance between the hyperplane and the nearest data points of each class in the space if. By choosing OSH from among the many that can separate the positive from the negative examples in the feature space, SVMs are avoiding the risk of overfitting.

[0414] Different mappings construct different SVMs. The mapping Φ:R^{d} [symbol] H

is performed by a kernel function

K(\vec{xᵢ},\vec{xⱼ})

which defines an inner product in the space H.

[0415] The decision function implemented by SVM can be written as (Burges, 1998 (118):

$$f ( {x}^{->} ) = sgn ( {\sum }_{i = 1}^{m} {y}_{i} {α}_{i} \cdot K ( {x}^{->} , {{x}^{->}}_{i} ) + b ) \qquad ( equation 2 )$$

where the coefficients αᵢ are obtained by solving the following convex Quadratic Programming (QP) problem:

$$Maximize {\sum }_{i = 1}^{m} {α}_{i} - \frac{1}{2} {\sum }_{i = 1}^{m} {\sum }_{j = 1}^{m} {α}_{i} {α}_{j} \cdot {y}_{i} {y}_{j} \cdot K ( {{x}^{->}}_{i} , {{x}^{->}}_{j} ) \\ subject to 0 \leq {α}_{i} \leq C \\ and {\sum }_{i = 1}^{m} {α}_{i} {y}_{i} = 0 \qquad ( equation 3 )$$

[0416] The regularity parameter C (equation 3) controls the trade off between margin and misclassification error. The \vec{x}ⱼ are called Support Vectors only if the corresponding αᵢ>0.

[0417] Two of the kernel functions used in the current example:

K(\vec{xᵢ},\vec{xⱼ})=(\vec{xᵢ}·\vec{xⱼ}+1)^{d} (equation 4)

K(\vec{xᵢ},\vec{xⱼ})=e^{(-r|}\vec{x^{ᵢ}}⁻\vec{x^{ⱼ}}^{|}^{²}⁾ (equation 5)

where the first one (equation 4) is called the polynomial kernel function of degree d which will eventually revert to the linear function when d=1, the latter (equation 5) is called the Radial Basic Function (RBF) kernel.

[0418] For a given data set, only the kernel function and the regularity parameter C must be selected to specify one SVM. An SVM has many attractive features. For instance, the solution of the QP problem is globally optimised while with neural networks the gradient based training algorithms only guarantee finding a local minima. In addition, SVM can handle large feature spaces, can effectively avoid overfitting (see above) by controlling the margin, can automatically identify a small subset made up of informative points, i.e., the Support Vectors, etc.

[0419] The classification of biological sample and thereby the identification of an neoplastic lesion as well as the response of such lesion to therapeutic agents based on gene expression data is a multi-class classification problem. The class number k is equal to the number tumor subclasses (e.g. histological features, TNM stage, grade, hormonal status) and is equal to response subgroupe to a certain therapeutic agent (e.g. pathologicaly confirmed complete remission, good remission, partial remission, or no remission, as well as progressive disease) which shall be predicted, i.e., which are present in the training data set. Due to the limited number of different classes in the present sample set, we decided to handle the multi-class classification by reducing the multi-classification to a series of binary classifications. For a k-class classification, k SVMs are constructed. The ith SVM will be trained with all of the samples in the ith class with positive labels and all other samples with negative labels. Finally an unknown sample is classified into the class that corresponds to the SVM with the highest output value. This method is used to construct a prediction/classification system for gene expression patterns of differentially expressed marker genes as given in Table 1a and 1b and 2.

[0420] Each data point generated by a microarray hybridization experiment or by real time RT-PCR (cf. example 1 and 2) corresponds to and is determined by the number of mRNA copies present in the analysed sample, i.e., from an experiment with n oligonucleotide types on a polynucleotide array, a series of n expression-level values is obtained. These n values are typically stored in a metrics file which is the result of the analysis of a “cel file” by the Affymetrix® Microarray Suite or software described above. The data from a series of m metrics files (representing m expression analyses) are taken to build an expression matrix, in which each of the m rows consists of an n-element expression vector for a single experiment. In order to normalise the expression values of the m experiments, we define x_{i,j} to be the sum of the logarithms of the expression level α_{i,j} for gene j (whose mRNA hybridizes with the oligonucleotide type j′ present on the microarray, or gives a valid ΔΔC_{T} intensity), normalized so that the expression vector \vec{xᵢ} has the Euclidean length l:

$${x}_{j , i} = \frac{ln ( {a}_{i , j} )}{\sqrt{{\sum }_{k = 1}^{n} {ln ( {a}_{i , k} )}^{2}}} \qquad ( equation 6 )$$

[0421] Initial analyses are carried out using a set of 20000-element expression vectors for 150 experiments as described in example 1 and 2 (100 experiments in the training set and 50 in the test set).

[0422] Using the knowledge that the 150 experiments represent three different response classes and two different tumor states as well as the information of tumor and non-tumor tissue, we trained the SVMs described above with the training set to recognize those response classes and disease states. The test set was used to assess the prediction accuracy. Here we have preformed crossvalidations utilizing the “leave one out” method and for more stringent testing a four to five fold validation (leave 25% out) with n iterations (n>100).

[0423] In such crossvalidations and classification experiments the predictive power of a subset of marker genes chosen from Table 1a and 1b (e.g. SEQ ID: 27, 38, 55, 81, 97, 98) has been tested. The average cross validation error rate was 8.333% with affinity levels as follows:

| Tissue sample | True response | Predicted CR | Predicted NC |
|---|---|---|---|
| Sample_1 | CR | 0.9141 | −0.9141 |
| Sample_2 | CR | 1.281 | −1.281 |
| Sample_3 | CR | 1.149 | −1.149 |
| Sample_4 | CR | 0.3987 | −0.3987 |
| Sample_5 | CR | 0.2182 | −0.2182 |
| Sample_6 | CR | 0.7127 | −0.7127 |
| Sample_7 | NC | −1.124 | 1.124 |
| Sample_8 | NC | −1.492 | 1.492 |
| Sample_9 | NC | −1.896 | 1.896 |
| Sample_10 | NC | 0.475 | −0.475 |
| Sample_11 | NC | −1.962 | 1.962 |
| Sample_12 | NC | −0.7557 | 0.7557 |

[0424] The misclassification of one sample can be compensated by addition of more marker genes from Table 1a and 1b. These data show the minimal number of marker genes that could be combined for a predictive assay or kit.

### EXAMPLE 5

[0425] In order to optimize prediction of non responding tumor samples one may use this class from the trainings cohort and run multiple statistical tests, suitable for group comparison such as t-test or Wilcoxon. As listed in Table 6 one can identify such genes with a differential expression in the non responding tumor tissue and a significance level (p-value) below 0.05. In Table 6 20 genes are selected fulfilling the criterion of low p-value and high expressional fold change between the two classes.

[0426] One may combine the gene list selected as most preferred given in Table 2 with those genes from Table 1b and performe classification experiments for any so far unclassified sample and predict response to chemotherapy.

[0427] While as those algorithms described in Example 4 can be implemented in a certain kernel to classify samples according to their specific gene expression into two classes another approach can be taken to predict class membership by implementation of a k-NN classification. The method of k-Nearest Neighbors (k-NN), proposed by T. M. Cover and P. E. Hart, an important approach to nonparametric classification, is quite easy and efficient. Partly because of its perfect mathematical theory, NN method develops into several variations. As we know, if we have infinitely many sample points, then the density estimates converge to the actual density function. The classifier becomes the Bayesian classifier if the large-scale sample is provided. But in practice, given a small sample, the Bayesian classifier usually fails in the estimation of the Bayes error especially in a high-dimensional space, which is called the disaster of dimension. Therefore, the method of k-NN has a great pity that the sample space must be large enough.

[0428] In k-nearest-neighbor classification, the training data set is used to classify each member of a “target” data set. The structure of the data is that there is a classification (categorical) variable of interest (e.g. “responder” (CR) or “non-responder” (NC)), and a number of additional predictor variables (gene expression values). Generally speaking, the algorithm is as follows:
[0429] 1. For each sample in the data set to be classified, locate the k nearest neighbors of the training data set. A Euclidean Distance measure can be used to calculate how close each member of the training set is to the target sample that is being examined.
[0430] 2. Examine the k nearest neighbors—which classification do most of them belong to? Assign this category to the sample being examined.
[0431] 3. Repeat this procedure for the remaining samples in the target set.

[0432] Of course the computing time goes up as k goes up, but the advantage is that higher values of k provide smoothing that reduces vulnerability to noise in the training data. In practical applications, typically, k is in units or tens rather than in hundreds or thousands.

[0433] The “nearest neighbors” are determined if given the considered the vector and the distance measurement. Given a training set of expression values for a certain number of samples T={(x₁, y1), (x2, y2), . . . , (xm, ym)}, to determine the class of the input vector x.

[0434] The most special case is the k-NN method, while k=1, which just searches the one nearest neighbor:

j=arg min//x−xi//

then, (x, yj) is the solution.

[0435] For estimation on the error rate of this classification the following considerations could be made:

[0436] A training set T={(x1, y1), (x2, y2), . . . , (xm, ym)} is called (k, d %)-stable if the error rate of k-NN method is d %, where d % is the empirical error rate from independent experiments. If the clustering of data are quite distinct (the class distance is the crucial standard of classification), then the k must be small. The key idea is we prefer the least k in the case that d % is bigger the threshold value.

[0437] The k-NN method gathers the nearest k neighbors and let them vote—the class of most neighbors wins. Theoretically, the more neighbors we consider, the smaller error rate it takes place. The general case is a little more complex. But by imagination, it is true to be the more

[0438] k the lower upper bound asymptotic to PBayes(e) if N is fixed.

[0439] One can use such algorithm to classify and cross validate a given cohort of samples based on the genes presented by this invention in Tables 1a and 1b. Most preferably the classification shall be performed based on the expression levels of the genes presented in Table 1b in combination with the genes from Table 2. With k=3 and >100 iteration one can get classifications as depicted below for a cross-validation experiment with the three classes “normal breast tissue” (not affected by cancer), non responding tumor (NC), and responding tumor (CR). Affinities ranging from −1 to 1 for a given class.

| | | Predicted | | | |
|---|---|---|---|---|---|
| Tissue | True | normal | Predicted- | Predicted- | |
| sample | response | breast | NC | CR | Remarks |
| “normal” | | 1 | −0.5 | −0.5 | |
| tissue | | | | | |
| Sample_1 | CR | −0.4994 | −0.5 | 0.9994 | |
| Sample_2 | CR | −0.4988 | −0.5 | 0.9988 | |
| Sample_3 | CR | −0.4988 | −0.5 | 0.9988 | |
| Sample_4 | CR | −0.5 | −0.5 | 1 | |
| Sample_5 | CR | −0.4988 | −0.5 | 0.9988 | |
| Sample_6 | CR | −0.5 | −0.5 | 1 | |
| Sample_7 | CR | −0.5 | −0.4988 | 0.9988 | |
| Sample_8 | CR | −0.4883 | −0.4649 | 0.9532 | |
| Sample_9 | NC | −0.497 | 0.997 | −0.5 | |
| Sample_10 | NC | −0.4969 | 0.9969 | −0.5 | |
| Sample_11 | NC | −0.4975 | 0.9975 | −0.5 | |
| Sample_12 | NC | −0.4982 | 0.9982 | −0.5 | |
| Sample_13 | NC | 1 | −0.5 | −0.5 | low tumor |
| | | | | | % |
| Sample_14 | NC | −0.5 | −0.4988 | 0.9988 | false |
| Sample_15 | NC | −0.4976 | 0.9976 | −0.5 | |
| Sample_16 | NC | −0.4976 | 0.9976 | −0.5 | |

[0440] The misclassification of one sample can be compensated by addition of more marker genes from Table 1a. These data show the minimal number of marker genes that could be combined for a predictive assay or kit.

### EXAMPLE 6

[0441] In order to get the most accurate prediction for response to chemotherapy based on the expression levels of genes listed in Tables 1a and Table 1b. One can implement a step wise classification model identifying first those individuals (tumor tissues) with the highest affinity (e.g. by k-NN classification) to the class of responding tumors (CR). If an so far unclassified tumor sample did not belong to the class of CR on may performe a second classification step for this sample using the expression levels of the genes from Table 1a (e.g. SEQ ID Nos: 2, 8, 9, 21, 24, 35, 53, 54, 57, 64, 80, 87, 89, 95, 97, 118 and 146) which will give in a k-NN classification a better separation of the non responding tumors from those which will respond partially. For this second classification step only the predefined classes NC and PR should be utilized.

### REFERENCES

### Patents Cited

[0442] U.S. Pat. No. 4,843,155 Chomczynski, P.
[0443] U.S. Pat. No. 5,262,31 Liang, P., and Pardee, A. B., 1993
[0444] U.S. Pat. No. 4,683,202 Mullis, K. B., 1987
[0445] U.S. Pat. No. 5,593,839
[0446] U.S. Pat. No. 5,578,832
[0447] U.S. Pat. No. 5,556,752
[0448] U.S. Pat. No. 5,631,734
[0449] U.S. Pat. No. 5,599,695
[0450] U.S. Pat. No. 4,683,195
[0451] U.S. Pat. No. 5,498,531
[0452] U.S. Pat. No. 5,714,331
[0453] U.S. Pat. No. 5,641,673 Haseloff et al.,
[0454] U.S. Pat. No. 5,223,409 Lander, E.,
[0455] U.S. Pat. No. 5,976,813 Beutel et al.
[0456] U.S. Pat. No. 5,283,317
[0457] U.S. Pat. No. 6,203,987
[0458] WO 97/29212
[0459] WO 97/27317
[0460] WO 95/22058
[0461] WO 99/12826
[0462] WO 97/02357
[0463] WO 94/13804
[0464] WO 94/10300
[0465] EP 0 785 280
[0466] EP 0 799 897
[0467] EP 0 728 520
[0468] EP 0 721 016
[0469] EP 0 321 201
[0470] GB2188638B

### OTHER REFERENCES CITED

[0471] (1) Publications cited: WHO. International Classification of Diseases, 10^{th} edition (ICD-10). WHO
[0472] (2) Sabin, L. H., Wittekind, C. (eds): TNM Classification of Malignant Tumors. Wiley, New York, 1997
[0473] (3) Sorlie et al., Proc Natl Acad Sci USA. 2001 Sep. 11; 98(19):10869-74 (3);
[0474] (4) van 't Veer et al., Nature. 2002 Jan. 31; 415(6871):530-6. (4).
[0475] (5) Perez, E. A.: Current Management of Metastatic Breast Cancer. Semin. Oncol., 1999; 26 (Suppl. 12): 1-10
[0476] (6) Sambrook et al., MOLECULAR CLONING: A LABORATORY MANUAL, 2d ed., 1989
[0477] (7) Ausubel et al., CURRENT PROTOCOLS IN MOLECULAR BIOLOGY, John Wiley & Sons, New York, N.Y., 1989.
[0478] (8) Tedder, T. F. et al., Proc. Natl. Acad. Sci. U.S.A. 85:208-212, 1988
[0479] (9) Hedrick, S. M. et al., Nature 308:149-153, 1984
[0480] (10) Lee, S. W. et al., Proc. Natl. Acad. Sci. U.S.A. 88:4225, 1984
[0481] (11) Sarkar, PCR Methods Applic. 2, 318-322, 1993
[0482] (12) Triglia et al., Nucleic Acids Res. 16, 81-86, 1988
[0483] (13) Lagerstrom et al., PCR Methods Applic. 1, 111-119, 1991
[0484] (14) Copeland & Jenkins, Trends in Genetics 7: 113-118, 1991
[0485] (15) Cohen, et al., Nature 366: 698-701, 1993
[0486] (16) Bonner et al., J. Mol. Biol. 81, 123 1973
[0487] (17) Bolton and McCarthy, Proc. Natl. Acad. Sci. U.S.A. 48, 1390 1962
[0488] (19) Altschul et al., Bull. Math. Bio. 48:603, 1986,
[0489] (20) Henikoff & Henikoff, Proc. Natl. Acad. Sci. USA 89:10915, 1992
[0490] (21) Pearson & Lipman, Proc. Nat'l Acad. Sci. USA 85:2444, 1988
[0491] (22) Pearson et al., Meth. Enzymol. 183:63, 1990
[0492] (23) Needleman & Wunsch, J. Mol. Biol. 48:444, 1970
[0493] (24) Sellers, SIAM J. Appl. Math.Xno:787, 1974
[0494] (25) Takamatsu, EMBO J. 6, 307-311, 1987
[0495] (26) Coruzzi et al., EMBO J. 3, 1671-1680, 1984
[0496] (27) Broglie et al., Science 224, 838-843, 1984
[0497] (28) Winter et al., Results Probl. Cell Differ. 17, 85-105, 1991
[0498] (29) Engelhard et al., Proc. Nat. Acad. Sci. 91, 3224-3227, 1994
[0499] (30) Logan & Shenk, Proc. Natl. Acad. Sci. 81, 3655-3659, 1984
[0500] (31) Scharf et al., Results Probl. Cell Differ. 20, 125-162, 1994
[0501] (32) Freshney R. I., ed., ANIMAL CELL CULTURE, 1986
[0502] (33) Wigler et al., Cell 11, 223-232, 1977
[0503] (34) Lowy et al., Cell 22, 817-823, 1980
[0504] (35) Wigler et al., Proc. Natl. Acad. Sci. 77, 3567-3570, 1980
[0505] (36) Colbere-Garapin et al., J. Mol. Biol. 150, 114, 1981
[0506] (37) Hartman & Mulligan, Proc. Natl. Acad. Sci. 85, 8047-8051, 1988
[0507] (38) Rhodes et al., Methods Mol. Biol. 55, 121-131, 1995
[0508] (39) Hampton et al., SEROLOGICAL METHODS: A LABORATORY MANUAL, APS Press, St. Paul, Minn., 1990
[0509] (40) Maddox et al., J. Exp. Med. 158, 1211-1216, 1983
[0510] (41) Porath et al., Prot. Exp. Purif. 3, Xno3-281, 1992
[0511] (42) Kroll et al., DNA Cell Biol. 12, 441-453, 1993
[0512] (43) Caruthers et al., Nucl. Acids Res. Symp. Ser. 215-223, 1980
[0513] (44) Horn et al. Nucl. Acids Res. Symp. Ser. 225-232, 1980
[0514] (45) Merrifield, J. Am. Chem. Soc. 85, 2149-2154, 1963
[0515] (46) Roberge et al., Science Xno9, 202-204, 1995
[0516] (47) Creighton, PROTEINS: STRUCTURES AND MOLECULAR PRINCIPLES, WH and Co., New York, N.Y., 198
[0517] (48) Cronin et al., Human Mutation 7:244, 1996
[0518] (49) Landegran et al., Science 241:1077-1080, 1988
[0519] (50) Nakazawa et al., PNAS 91:360-364, 1994
[0520] (51) Abravaya et al., Nuc Acid Res 23:675-682, 1995
[0521] (52) Guatelli, J. C. et al., Proc. Natl. Acad. Sci. USA 87:1874-1878, 1990
[0522] (53) Kwoh, D. Y. et al., Proc. Natl. Acad. Sci. USA 86:1173-1177, 1989
[0523] (54) Lizardi, P. M. et al., Bio/Technology 6:1197, 1988
[0524] (55) Brown, Meth. Mol. Biol. 20, 18, 1994
[0525] (56) Sonveaux, Meth. Mol. Biol. Xno, 1-72, 1994
[0526] (57) Uhlmann et al., Chem. Rev. 90, 543-583, 1990
[0527] (58) Gee et al., in Huber & Carr, MOLECULAR AND IMMUNOLOGIC APPROACHES, Publishing Co., Mt. Kisco, N.Y., 1994
[0528] (59) Agrawal et al., Trends Biotechnol. 10, 152-158, 1992
[0529] (60) Uhlmann et al., Tetrahedron. Lett. 215, 3539-3542, 1987
[0530] (61) Cech, Science 236, 1532-1539, 1987
[0531] (62) Cech, Ann. Rev. Biochem. 59, 543-568, 1990
[0532] (63) Couture & Stinchcomb, Trends Genet. 12, 510-515, 1996
[0533] (64) Haseloff et al. Nature 334, 585-591, 1988
[0534] (65) Kohler et al., Nature 256, 495-497, 1985
[0535] (66) Kozbor et al., J. Immunol. Methods 81, 3142, 1985
[0536] (67) Cote et al., Proc. Natl. Acad. Sci. 80, 20Xno-2030, 1983
[0537] (68) Cole et al., Mol. Cell. Biol. 62, 109-120, 1984
[0538] (69) Morrison et al., Proc. Natl. Acad. Sci. 81, 6851-6855, 1984
[0539] (70) Neuberger et al., Nature 312, 604-608, 1984
[0540] (71) Takeda et al., Nature 314, 452-454, 1985
[0541] (72) Burton, Proc. Natl. Acad. Sci. 88, 11120-11123, 1991
[0542] (73) Thirion et al., Eur. J. Cancer Prev. 5, 507-11, 1996
[0543] (74) Coloma & Morrison, Nat. Biotechnol. 15, 159-63, 1997
[0544] (75) Mallender & Voss, J. Biol. Chem. Xno9, 199-206, 1994
[0545] (76) Verhaar et al., Int. J. Cancer 61, 497-501, 1995
[0546] (77) Nicholls et al., J. Immunol. Meth. 165, 81-91, 1993
[0547] (78) Orlandi et al., Proc. Natl. Acad. Sci. 86, 3833-3837, 1989
[0548] (79) Winter et al., Nature 349, 293-299, 1991
[0549] (80) Lam, Anticancer Drug Des. 12, 145, 1997
[0550] (81) DeWitt et al., Proc. Natl. Acad. Sci. U.S.A. 90, 6909, 1993
[0551] (82) Erb et al. Proc. Natl. Acad. Sci. U.S.A. 91, 11422, 1994
[0552] (83) Zuckermann et al., J. Med. Chem. 37, Xno78, 1994
[0553] (84) Cho et al., Science Xnol, 1303, 1993
[0554] (85) Carell et al., Angew. Chem. Int. Ed. Engl. 33, 2059 & 2061, 1994
[0555] (86) Gallop et al., J. Med. Chem. 37, 1233, 1994
[0556] (87) Houghten, BioTechniques 13, 412-421, 1992
[0557] (88) Lam, Nature 354, 8284, 1991
[0558] (89) Fodor, Nature 364, 555-556, 1993
[0559] (90) Cull et al., Proc. Natl. Acad. Sci. U.S.A. 89, 1865-1869, 1992
[0560] (91) Scott & Smith, Science 249, 386-390, 1990
[0561] (92) Devlin, Science 249, 404-406, 1990
[0562] (93) Cwirla et al., Proc. Natl. Acad. Sci. 97, 6378-6382, 1990
[0563] (94) Felici, J. Mol. Biol. 222, 301-310, 1991
[0564] (95) Jayawickreme et al., Proc. Natl. Acad. Sci. U.S.A. 19, 1614-1618, 1994
[0565] (96) Chelsky, Strategies for Screening Combinatorial Libraries 1995
[0566] (97) Salmon et al., Molecular Diversity 2, 57-63, 1996
[0567] (98) McConnell et al., Science 257, 1906-1912, 1992
[0568] (99) Sjolander & Urbaniczky, Anal. Chem. 63, 2338-2345, 1991
[0569] (100) Szabo et al., Curr. Opin. Struct. Biol. 5, 699-705, 1995
[0570] (101) Zervos et al., Cell 72, 223-232, 1993
[0571] (102) Madura et al., J. Biol. Chem. Xno8, 12046-12054, 1993
[0572] (103) Bartel et al., BioTechniques 14, 920-924, 1993
[0573] (104) Iwabuchi et al., Oncogene 8, 1693-1696, 1993
[0574] (105) Findeis et al. Trends in Biotechnol. 11, 202-205, 1993
[0575] (106) Chiou et al., GENE THERAPEUTICS: METHODS AND APPLICATIONS OF DIRECT GENE TRANSFER J. A. Wolff, ed., 1994
[0576] (107) Wu & Wu, J. Biol. Chem. Xno3, 621-24, 1988
[0577] (108) Wu et al., J. Biol. Chem. Xno9, 54246, 1994
[0578] (109) Zenke et al., Proc. Natl. Acad. Sci. U.S.A. 87, 3655-59, 1990
[0579] (110) Wu et al., J. Biol. Chem. Xno6, 33842, 1991
[0580] (111) REMINGTON'S PHARMACEUTICAL SCIENCES Maack Publishing Co., Easton, Pa.
[0581] (112) Hille, Excitable Membranes, Sunderland, M A, Sinauer Associates, Inc.
[0582] (113) Van Heeke & Schuster, J. Biol. Chem. 264, 5503-5509, 1989
[0583] (114) Grant et al., Methods Enzymol. 153, 516-544, 1987
[0584] (115) Weston and Watkins, Proceedings of the Seventh European Symposium On Artificial Neural Networks, 1999
[0585] (116) Vapnik, The Nature of Statistical Learning Theory, 1995, Springer, New York
[0586] (117) Vapnik, Statistical Learning Theory, 1998, Wiley, New York
[0587] (118) Burges, Data Mining and Knowledge Discovery, 2(2):955-974, 1998

TABLE 1a
List of 165 genes which are differentially expressed in responders compared to
non-responders or normal healthy tissue. Reference is given to the SEQ ID NOs of the
sequence listing.

| SEQ ID NO: | SEQ ID NO: | | Ref. | | |
|---|---|---|---|---|---|
| (DNA | (Protein | | Sequences | | |
| Sequence) | Sequence) | Gene_Symbol | [A] | Gene_ID | Locus_Link_ID |
| 1 | 166 | CTSB | NM_001908 | 4503138 | 1508 |
| 2 | 167 | SSR1 | NM_003144 | 14781630 | 6745 |
| 3 | 168 | STX8 | NM_002803 | 4506208 | 5701 |
| 4 | 169 | KPNA2 | NM_002266 | 4504896 | 3838 |
| 5 | 170 | CSE1L | NM_001316 | 18591914 | 1434 |
| 6 | 171 | RHEB2 | NM_005614 | 18600748 | 6009 |
| 7 | 172 | DKC1 | NM_001363 | 15011921 | 1736 |
| 8 | 173 | IGFBP4 | NM_001552 | 10835020 | 3487 |
| 9 | 174 | SMC1L1 | NM_006306 | — | 8243 |
| 10 | 175 | PWP1 | NM_007062 | 5902033 | 11137 |
| 11 | 176 | HDAC2 | NM_001527 | 4557640 | 3066 |
| 12 | 177 | PRKAB1 | NM_006253 | 18602783 | 5564 |
| 13 | 178 | IMPDH2 | NM_000884 | 4504688 | 3615 |
| 14 | 179 | UBE2A | NM_003336 | 4507768 | 7319 |
| 15 | 180 | YR-29 | NM_014886 | 7662676 | 10412 |
| 16 | 181 | MUF1 | NM_006369 | 5453747 | 10489 |
| 17 | 182 | MYO10 | NM_012334 | 11037056 | 4651 |
| 18 | 183 | EGFR | NM_005228 | 4885198 | 1956 |
| 19 | 184 | IFRD1 | NM_001550 | 4504606 | 3475 |
| 20 | 185 | CD2BP2 | NM_006110 | 5174408 | 10421 |
| 21 | 186 | ARL3 | NM_004311 | 4757773 | 403 |
| 22 | 187 | CCNB2 | NM_004701 | 10938017 | 9133 |
| 23 | 188 | FMOD | NM_002023 | 18548671 | 2331 |
| 24 | 189 | SLC7A8 | NM_012244 | 14751202 | 23428 |
| 25 | 190 | E2-EPF | NM_014501 | 7657045 | 27338 |
| 26 | 191 | AGT | NM_000029 | 4557286 | 183 |
| 27 | 192 | FHL2 | NM_001450 | 4503722 | 2274 |
| 28 | 193 | LDLC | NM_007357 | 6678675 | 22796 |
| 29 | 194 | MGC16824 | NM_020314 | 10092674 | 57020 |
| 30 | 195 | UGDH | NM_003359 | 4507812 | 7358 |
| 31 | 196 | MAD2L1 | NM_002358 | 6466452 | 4085 |
| 32 | 197 | DDB2 | NM_000107 | 4557514 | 1643 |
| 33 | 198 | OS4 | NM_005730 | 5031964 | 10106 |
| 34 | 199 | BCL2 | NM_000633 | 13646672 | 596 |
| 35 | 200 | SEMA3C | NM_006379 | 5454047 | 10512 |
| 36 | 201 | DTR | NM_001945 | 4503412 | 1839 |
| 37 | 202 | GARP | NM_005512 | 5031706 | 2615 |
| 38 | 203 | ACK1 | NM_005781 | 8922074 | 10188 |
| 39 | 204 | EDG2 | NM_001401 | 16950637 | 1902 |
| 40 | 205 | RARRES3 | NM_004585 | 8051633 | 5920 |
| 41 | 206 | CCNH | NM_001239 | 17738313 | 902 |
| 42 | 207 | PREP | NM_002726 | 4506042 | 5550 |
| 43 | 208 | COL11A1 | NM_001854 | 18548530 | 1301 |
| 44 | 209 | GALC | NM_000153 | 4557612 | 2581 |
| 45 | 210 | HMGCS2 | NM_005518 | 5031750 | 3158 |
| 46 | 211 | ZNF274 | NM_016324 | 7706506 | 10782 |
| 47 | 212 | TFF1 | NM_003225 | 4507450 | 1031 |
| 48 | 213 | RAD51 | NM_002875 | 4506388 | 5888 |
| 49 | 214 | ASNS | NM_001673 | 4502258 | 440 |
| 50 | 215 | PCMT1 | NM_005389 | 4885538 | 5110 |
| 51 | 216 | ESR1 | NM_000125 | 4503602 | 2099 |
| 52 | 217 | ACAT1 | NM_000019 | 4557236 | 38 |
| 53 | 218 | XPA | NM_000380 | 4507936 | 7507 |
| 54 | 219 | LAF4 | NM_002285 | 4504938 | 3899 |
| 55 | 220 | COL10A1 | NM_000493 | 18105031 | 1300 |
| 56 | 221 | KIAA1041 | NM_014947 | 15299048 | 22887 |
| 57 | 222 | PLA2G7 | NM_005084 | 4826883 | 7941 |
| 58 | 223 | GRP | NM_002091 | 4504158 | 2922 |
| 59 | 224 | CYP2B6 | NM_000767 | 14550410 | 1555 |
| 60 | 225 | CHAD | NM_001267 | 4502798 | 1101 |
| 61 | 226 | GALNT10 | NM_017540 | 9055207 | 55568 |
| 62 | 227 | GADD45B | NM_015675 | 9945331 | 4616 |
| 63 | 228 | WBSCR20 | NM_017528 | 8923713 | 114049 |
| 64 | 229 | BTBD2 | NM_017797 | 8923361 | 55643 |
| 65 | 230 | PGR | NM_000926 | 4505766 | 5241 |
| 66 | 231 | TBPL1 | NM_004865 | 4759233 | 9519 |
| 67 | 232 | C4B | NM_000592 | 14577918 | 721 |
| 68 | 233 | CCNG1 | NM_004060 | — | 900 |
| 69 | 234 | PDHB | NM_000925 | 4505686 | 5162 |
| 70 | 235 | HNRPDL | NM_005463 | 14110410 | 9987 |
| 71 | 236 | TAF11 | NM_005643 | 5032150 | 6882 |
| 72 | 237 | AMACR | NM_014324 | 14725899 | 23600 |
| 73 | 238 | EMD | NM_000117 | 4557552 | 2010 |
| 74 | 239 | NR2F1 | NM_005654 | 5032172 | 7025 |
| 75 | 240 | HSF2 | NM_004506 | 6806888 | 3298 |
| 76 | 241 | SPG4 | NM_014946 | — | 6683 |
| 77 | 242 | TRIP11 | NM_004239 | 10863904 | 9321 |
| 78 | 243 | OCLN | NM_002538 | 9257230 | 4950 |
| 79 | 244 | CACNA1D | NM_000720 | — | 776 |
| 80 | 245 | CYP2B7 | NR_001278 | 14550410 | 1556 |
| 81 | 246 | FHL1 | NM_001449 | 4503720 | 2273 |
| 82 | 247 | MSX2 | NM_002449 | 18560141 | 4488 |
| 83 | 248 | PAI-RBP1 | NM_015640 | 7661625 | 26135 |
| 84 | 249 | CLDN14 | NM_012130 | 18593128 | 23562 |
| 85 | 250 | ITPK1 | NM_014216 | 18583687 | 3705 |
| 86 | 251 | ERBB2 | NM_004448 | 4758297 | 2064 |
| 87 | 252 | TP53 | NM_000546 | 8400737 | 7157 |
| 88 | 253 | HSPA2 | NM_021979 | 13676856 | 3306 |
| 89 | 254 | LIG1 | NM_015541 | 18554950 | 26018 |
| 90 | 255 | GSS | NM_000178 | 4504168 | 2937 |
| 91 | 256 | PRO1843 | NM_018507 | 8924082 | 55378 |
| 92 | 257 | MKI67 | NM_002417 | 4505188 | 4288 |
| 93 | 258 | BIK | NM_001197 | 7262371 | 638 |
| 94 | 259 | KIAA0225 | D86978 | 18566873 | 23165 |
| 95 | 260 | TNRC15 | AB014542 | 18550089 | 26058 |
| 96 | 261 | SFRS5 | NM_006925 | 5902077 | 6430 |
| 97 | 262 | RPL17 | NM_000985 | 14591906 | 6139 |
| 98 | 263 | GNG12 | NM_018841 | — | 55970 |
| 99 | 264 | LAP1B | NM_015602 | 17488747 | 26092 |
| 100 | 265 | LOC253782 | AL080192 | — | 253782 |
| 101 | 266 | COL5A1 | NM_000093 | 18571690 | 1289 |
| 102 | 267 | CXCL13 | NM_006419 | 5453576 | 10563 |
| 103 | 268 | TTS-2.2 | AF055000 | 3231586CB1 | 57104 |
| 104 | 269 | KIAA0056 | D29954 | 18578675 | 23310 |
| 105 | 270 | FLJ22642 | AI700633 | — | — |
| 106 | 271 | LOC113146 | W28438 | 15300131 | 113146 |
| 107 | 272 | GPR126 | NM_020455 | 18562351 | 57211 |
| 108 | 273 | PMSCL1 | NM_005033 | 4826921 | 5393 |
| 109 | 274 | KIAA0418 | NM_014631 | 7662103 | — |
| 110 | 275 | SULF1 | NM_015170 | 18571189 | 23213 |
| 111 | 276 | KIAA0673 | NM_015102 | 14720169 | 261734 |
| 112 | 277 | FLJ10803 | NM_018224 | — | 55744 |
| 113 | 278 | DKFZp586M0723 | AL050227 | — | — |
| 114 | 279 | C4A | NM_007293 | 14577920 | 720 |
| 115 | 280 | ZAP3 | L40403 | 18597333 | 56252 |
| 116 | 281 | NEK9 | NM_033116 | 14916458 | 91754 |
| 117 | 282 | FLJ13125 | AK023187 | 14726621 | — |
| 118 | 283 | FMO5 | NM_001461 | 4503760 | 2330 |
| 119 | 284 | COMP | NM_000095 | 4557482 | 1311 |
| 120 | 285 | CSPG2 | NM_004385 | 4758081 | 1462 |
| 121 | 286 | LOC151996 | AA418080 | 18554956 | — |
| 122 | 287 | TFAP2B | NM_003221 | 4507442 | 7021 |
| 123 | 288 | OR7E38P | AF065854 | 18544324 | 10821 |
| 124 | 289 | RAB31 | NM_006868 | 5803130 | 11031 |
| 125 | 290 | HSPC126 | NM_014166 | 14759175 | 29079 |
| 126 | 291 | UMP-CMPK | NM_016308 | 7706496 | 51727 |
| 127 | 292 | FLJ22195 | NM_022758 | 12232426 | 64771 |
| 128 | 293 | DCTN4 | NM_016221 | 14733974 | 51164 |
| 129 | 294 | FLJ20273 | NM_019027 | 9506670 | 54502 |
| 130 | 295 | KIF4A | NM_012310 | 14765683 | 24137 |
| 131 | 296 | THTP | NM_024328 | 13236576 | 79178 |
| 132 | 297 | PLSCR4 | NM_020353 | 9966818 | 57088 |
| 133 | 298 | FLJ11323 | NM_018390 | 8922994 | 55344 |
| 134 | 299 | MGC11242 | NM_024320 | 13236560 | 79170 |
| 135 | 300 | CEGP1 | NM_020974 | 10190747 | 57758 |
| 136 | 301 | SRR | NM_021947 | 8922495 | 63826 |
| 137 | 302 | HSPC177 | NM_015961 | 7705488 | 51510 |
| 138 | 303 | MGC3103 | NM_024036 | 13128987 | 78999 |
| 139 | 304 | FLJ20641 | NM_017915 | 8923595 | 55010 |
| 140 | 305 | FLJ13646 | NM_024584 | 13375767 | 79635 |
| 141 | 306 | KCNK15 | NM_022358 | 16507967 | 60598 |
| 142 | 307 | RNASEL | NM_021133 | 10863928 | 6041 |
| 143 | 308 | CRSP6 | NM_004268 | 18577903 | 9440 |
| 144 | 309 | COL5A2 | NM_000393 | 16554580 | 1290 |
| 145 | 310 | LOC51218 | NM_016417 | 9994192 | 51218 |
| 146 | 311 | APBB2 | NM_173075 | 18557629 | 323 |
| 147 | 312 | yy15c12.s1 | N31716 | — | — |
| 148 | 313 | AD037 | NM_032023 | 14042936 | 83937 |
| 149 | 314 | FLJ20477 | AA203365 | 8923441 | — |
| 150 | 315 | MARKL1 | NM_031417 | 13899224 | 57787 |
| 151 | 316 | LUM | NM_002345 | 4505046 | 4060 |
| 152 | 317 | COL3A1 | NM_000090 | 15149480 | 1281 |
| 153 | 318 | COL1A1 | NM_000088 | 18587373 | 1277 |
| 154 | 319 | BF | NM_001710 | 14550403 | 629 |
| 155 | 320 | ADAM12 | NM_003474 | 13259517 | 8038 |
| 156 | 321 | LOXL1 | NM_005576 | 5031882 | 4016 |
| 157 | 322 | CEACAM6 | NM_002483 | 4505340 | 4680 |
| 158 | 323 | MMP11 | NM_005940 | 13027795 | 4320 |
| 159 | 324 | MMP1 | NM_002421 | 13027798 | 4312 |
| 160 | 325 | MMP13 | NM_002427 | 13027796 | 4322 |
| 161 | 326 | SERPINH1 | NM_001235 | 4757923 | 872 |
| 162 | 327 | PITX1 | NM_002653 | 4505824 | 5307 |
| 163 | 328 | RAD52 | NM_015419 | 18390318 | 25878 |
| 164 | 329 | INHBA | NM_002192 | 4504698 | 3624 |
| 165 | 330 | CSPG2 | NM_004385 | 4758081 | 1462 |

TABLE 1b
List of 20 genes which are differentially expressed in non-responding tumors
compared to tumors with at least a minor therapy assosiated regression or normal
healthy tissue. Reference is given to the SEQ ID NOs of the sequence listing.

| SEQ ID NO: | SEQ ID NO: | | Ref. | | |
|---|---|---|---|---|---|
| (DNA | (Protein | | Sequences | | |
| Sequence) | Sequence) | Gene_Symbol | [A] | UniGene_ID | Locus_Link_ID |
| 472 | 492 | PRG1 | NM_002727 | 1908 | 5552 |
| 473 | 493 | GBP1 | NM_002053 | 62661 | 2633 |
| 474 | 494 | ALEX2 | NM_014782 | 48924 | 9823 |
| 475 | 495 | CD53 | NM_000560 | 82212 | 963 |
| 476 | 496 | VCAM1 | NM_001078 | 109225 | 7412 |
| 477 | 497 | MAPT | NM_005910 | 101174 | 4137 |
| 478 | 498 | EGR2 | NM_000399 | 1395 | 1959 |
| 479 | 499 | TDO2 | NM_005651 | 183671 | 6999 |
| 480 | 500 | ADAMDEC1 | NM_014479 | 145296 | 27299 |
| 481 | 501 | TFEC | NM_012252 | 113274 | 22797 |
| 482 | 502 | BTF3 | NM_001207 | 101025 | 689 |
| 483 | 503 | FLNB | NM_001457 | 81008 | 2317 |
| 484 | 504 | TFRC | NM_003234 | 77356 | 7037 |
| 485 | 505 | EIF4B | NM_001417 | 93379 | 1975 |
| 486 | 506 | MAPK3 | — | 861 | 5595 |
| 487 | 507 | LOC161291 | — | 85335 | 161291 |
| 488 | 508 | SLC1A1 | NM_004170 | 91139 | 6505 |
| 489 | 509 | MST4 | NM_016542 | 23643 | 51765 |
| 490 | 510 | BLAME | NM_014036 | 20450 | 56833 |
| 491 | 511 | NME7 | NM_013330 | 274479 | 29922 |

TABLE 2
List of 47 preferred genes which differentially expressed in responders compared to
non responders or normal healthy tissue. Listed genes are preferred genes, e.g., for
use in the assessment whether or not a subject is expected to respond or not to
respond to a given mode of treatment.

| SEQ ID NO: | SEQ ID NO: | | Ref. | | |
|---|---|---|---|---|---|
| (DNA | (Protein | | Sequences | | |
| Sequence) | Sequence) | Gene Symbol | [A] | Gene_ID | Locus_Link_ID |
| 4 | 169 | KPNA2 | NM_002266 | 4504896 | 3838 |
| 5 | 170 | CSE1L | NM_001316 | 18591914 | 1434 |
| 6 | 171 | RHEB2 | NM_005614 | 18600748 | 6009 |
| 7 | 172 | DKC1 | NM_001363 | 15011921 | 1736 |
| 8 | 173 | IGFBP4 | NM_001552 | 10835020 | 3487 |
| 11 | 176 | HDAC2 | NM_001527 | 4557640 | 3066 |
| 12 | 177 | PRKAB1 | NM_006253 | 18602783 | 5564 |
| 13 | 178 | IMPDH2 | NM_000884 | 4504688 | 3615 |
| 15 | 180 | YR-29 | NM_014886 | 7662676 | 10412 |
| 22 | 187 | CCNB2 | NM_004701 | 10938017 | 9133 |
| 23 | 188 | FMOD | NM_002023 | 18548671 | 2331 |
| 24 | 189 | SLC7A8 | NM_012244 | 14751202 | 23428 |
| 25 | 190 | E2-EPF | NM_014501 | 7657045 | 27338 |
| 26 | 191 | AGT | NM_000029 | 4557286 | 183 |
| 27 | 192 | FHL2 | NM_001450 | 4503722 | 2274 |
| 29 | 194 | MGC16824 | NM_020314 | 10092674 | 57020 |
| 31 | 196 | MAD2L1 | NM_002358 | 6466452 | 4085 |
| 32 | 197 | DDB2 | NM_000107 | 4557514 | 1643 |
| 40 | 205 | RARRES3 | NM_004585 | 8051633 | 5920 |
| 43 | 208 | COL11A1 | NM_001854 | 18548530 | 1301 |
| 50 | 215 | PCMT1 | NM_005389 | 4885538 | 5110 |
| 51 | 216 | ESR1 | NM_000125 | 4503602 | 2099 |
| 55 | 220 | COL10A1 | NM_000493 | 18105031 | 1300 |
| 58 | 223 | GRP | NM_002091 | 4504158 | 2922 |
| 61 | 226 | GALNT10 | NM_017540 | 9055207 | 55568 |
| 65 | 230 | PGR | NM_000926 | 4505766 | 5241 |
| 68 | 233 | CCNG1 | NM_004060 | — | 900 |
| 69 | 234 | PDHB | NM_000925 | 4505686 | 5162 |
| 74 | 239 | NR2F1 | NM_005654 | 5032172 | 7025 |
| 81 | 246 | FHL1 | NM_001449 | 4503720 | 2273 |
| 82 | 247 | MSX2 | NM_002449 | 18560141 | 4488 |
| 83 | 248 | PAI-RBP1 | NM_015640 | 7661625 | 26135 |
| 92 | 257 | MKI67 | NM_002417 | 4505188 | 4288 |
| 98 | 263 | GNG12 | NM_018841 | — | 55970 |
| 100 | 265 | LOC253782 | AL080192 | — | 253782 |
| 101 | 266 | COL5A1 | NM_000093 | 18571690 | 1289 |
| 104 | 269 | KIAA0056 | D29954 | 18578675 | 23310 |
| 105 | 270 | FLJ22642 | AI700633 | — | — |
| 106 | 271 | LOC113146 | W28438 | 15300131 | 113146 |
| 108 | 273 | PMSCL1 | NM_005033 | 4826921 | 5393 |
| 113 | 278 | DKFZp586M0723 | AL050227 | — | — |
| 124 | 289 | RAB31 | NM_006868 | 5803130 | 11031 |
| 128 | 293 | DCTN4 | NM_016221 | 14733974 | 51164 |
| 132 | 297 | PLSCR4 | NM_020353 | 9966818 | 57088 |
| 129 | 294 | FLJ20273 | NM_019027 | 9506670 | 54502 |
| 133 | 298 | FLJ11323 | NM_018390 | 8922994 | 55344 |
| 138 | 303 | MGC3103 | NM_024036 | 13128987 | 78999 |

TABLE 3
Relative expression of 165 genes in complete responders as compared to non-
responders and normal tissue. (CR—complete responder to therapy;
NC—no change in tumor state; NT—normal healthy tissue)

| SEQ ID NO: | SEQ ID NO: | | | | |
|---|---|---|---|---|---|
| (DNA | (Protein | | | | |
| Sequence) | Sequence) | Gene_Symbol | CR_vs._NC | CR_vs_NT | NC_vs_NT |
| 1 | 166 | CTSB | 1.69033759 | 2.53990608 | 1.50260284 |
| 2 | 167 | SSR1 | 1.69676002 | 1.56735024 | 0.92373125 |
| 3 | 168 | STX8 | 1.42795315 | 1.65931125 | 1.16202079 |
| 4 | 169 | KPNA2 | 2.10809096 | 2.08540708 | 0.98923961 |
| 5 | 170 | CSE1L | 2.00249838 | 2.79008752 | 1.39330326 |
| 6 | 171 | RHEB2 | 1.84519193 | 1.60184035 | 0.86811584 |
| 7 | 172 | DKC1 | 2.25597289 | 2.3855889 | 1.0574546 |
| 8 | 173 | IGFBP4 | 0.27862606 | 0.38691248 | 1.38864428 |
| 9 | 174 | SMC1L1 | 1.69816116 | 1.71849631 | 1.01197481 |
| 10 | 175 | PWP1 | 0.64477544 | 0.59496475 | 0.92274723 |
| 11 | 176 | HDAC2 | 3.14799689 | 2.11008385 | 0.67029413 |
| 12 | 177 | PRKAB1 | 0.52384682 | 0.56333165 | 1.07537477 |
| 13 | 178 | IMPDH2 | 0.43342682 | 0.53415121 | 1.23239078 |
| 14 | 179 | UBE2A | 1.56667644 | 1.8748269 | 1.19669056 |
| 15 | 180 | YR-29 | 0.51635771 | 0.3928245 | 0.7607604 |
| 16 | 181 | MUF1 | 1.48621121 | 1.67042393 | 1.12394787 |
| 17 | 182 | MYO10 | 2.64854259 | 1.9657171 | 0.74218822 |
| 18 | 183 | EGFR | 1.84523855 | 0.3988927 | 0.21617406 |
| 19 | 184 | IFRD1 | 2.34518159 | 0.67841153 | 0.28927889 |
| 20 | 185 | CD2BP2 | 0.40973605 | 0.74398402 | 1.81576414 |
| 21 | 186 | ARL3 | 0.46877208 | 0.81409499 | 1.73665419 |
| 22 | 187 | CCNB2 | 2.94729142 | 5.81162556 | 1.97185304 |
| 23 | 188 | FMOD | 0.33346407 | 0.24429053 | 0.73258426 |
| 24 | 189 | SLC7A8 | 0.23327957 | 0.68038164 | 2.91659333 |
| 25 | 190 | E2-EPF | 2.50218494 | 4.49667635 | 1.79709992 |
| 26 | 191 | AGT | 0.38629467 | 0.52277847 | 1.35331525 |
| 27 | 192 | FHL2 | 0.31699809 | 0.39190285 | 1.23629407 |
| 28 | 193 | LDLC | 0.56234146 | 0.88888889 | 1.58069244 |
| 29 | 194 | MGC16824 | 0.51520913 | 0.67362665 | 1.30748198 |
| 30 | 195 | UGDH | 0.4487715 | 0.59229116 | 1.31980566 |
| 31 | 196 | MAD2L1 | 4.48217081 | 6.89647789 | 1.53864683 |
| 32 | 197 | DDB2 | 0.37904516 | 0.3243275 | 0.85564341 |
| 33 | 198 | OS4 | 0.64290847 | 0.50896135 | 0.79165444 |
| 34 | 199 | BCL2 | 0.37660415 | 0.26111358 | 0.69333698 |
| 35 | 200 | SEMA3C | 0.5199821 | 0.48877024 | 0.93997512 |
| 36 | 201 | DTR | 7.22480411 | 0.4189956 | 0.05799404 |
| 37 | 202 | GARP | 0.47456604 | 0.3525155 | 0.74281654 |
| 38 | 203 | ACK1 | 0.52564876 | 0.49278642 | 0.93748232 |
| 39 | 204 | EDG2 | 0.71655585 | 0.46969319 | 0.6554872 |
| 40 | 205 | RARRES3 | 0.24142196 | 1.41881212 | 5.87689745 |
| 41 | 206 | CCNH | 0.55809994 | 0.42039831 | 0.75326706 |
| 42 | 207 | PREP | 1.84855753 | 1.63361667 | 0.88372509 |
| 43 | 208 | COL11A1 | 0.6377322 | 30.5047541 | 47.8331723 |
| 44 | 209 | GALC | 0.50650838 | 0.63980608 | 1.26316978 |
| 45 | 210 | HMGCS2 | 0.04797018 | 0.03074921 | 0.64100686 |
| 46 | 211 | ZNF274 | 1.70500973 | 0.86640362 | 0.50815172 |
| 47 | 212 | TFF1 | 0.0321807 | 0.2064045 | 6.41392222 |
| 48 | 213 | RAD51 | 3.1036169 | 2.89007176 | 0.93119475 |
| 49 | 214 | ASNS | 3.60284107 | 2.12910917 | 0.59095284 |
| 50 | 215 | PCMT1 | 2.46691568 | 1.76150989 | 0.71405355 |
| 51 | 216 | ESR1 | 0.12287491 | 0.2490413 | 2.02678727 |
| 52 | 217 | ACAT1 | 0.51017664 | 0.39593742 | 0.7760791 |
| 53 | 218 | XPA | 0.51539825 | 0.52117332 | 1.01120505 |
| 54 | 219 | LAF4 | 0.23519327 | 0.35275966 | 1.49987143 |
| 55 | 220 | COL10A1 | 0.38555774 | 9.32859382 | 24.1950629 |
| 56 | 221 | KIAA1041 | 1.44589009 | 1.01679685 | 0.70323246 |
| 57 | 222 | PLA2G7 | 4.23491725 | 4.95203213 | 1.16933386 |
| 58 | 223 | GRP | 0.12594309 | 0.25636115 | 2.03553163 |
| 59 | 224 | CYP2B6 | 0.01213194 | 0.12755005 | 10.513574 |
| 60 | 225 | CHAD | 0.02707726 | 0.17583189 | 6.49371152 |
| 61 | 226 | GALNT10 | 0.32020561 | 0.93356021 | 2.91550231 |
| 62 | 227 | GADD45B | 0.51944741 | 0.22157381 | 0.42655678 |
| 63 | 228 | WBSCR20 | 1.61337697 | 2.19652173 | 1.36144358 |
| 64 | 229 | BTBD2 | 0.59662324 | 1.02610179 | 1.71984885 |
| 65 | 230 | PGR | 0.06700908 | 0.12481888 | 1.86271582 |
| 66 | 231 | TBPL1 | 1.71529386 | 1.53220024 | 0.89325816 |
| 67 | 232 | C4B | 0.12173232 | 0.37926849 | 3.11559395 |
| 68 | 233 | CCNG1 | 0.46882525 | 0.37588048 | 0.80174965 |
| 69 | 234 | PDHB | 0.48347992 | 0.82135629 | 1.69884261 |
| 70 | 235 | HNRPDL | 0.62657647 | 0.54249869 | 0.86581401 |
| 71 | 236 | TAF11 | 1.83477376 | 1.42164687 | 0.77483497 |
| 72 | 237 | AMACR | 0.61312794 | 0.84739097 | 1.38207854 |
| 73 | 238 | EMD | 1.6831552 | 1.40144514 | 0.83262978 |
| 74 | 239 | NR2F1 | 0.2644964 | 0.09725355 | 0.36769327 |
| 75 | 240 | HSF2 | 1.72328808 | 1.03289666 | 0.5993755 |
| 76 | 241 | SPG4 | 2.02820496 | 1.22197745 | 0.60249209 |
| 77 | 242 | TRIP11 | 0.63637488 | 0.86619209 | 1.36113495 |
| 78 | 243 | OCLN | 0.47955471 | 0.70987061 | 1.48027033 |
| 79 | 244 | CACNA1D | 0.16768932 | 0.44304396 | 2.64205236 |
| 80 | 245 | CYP2B7 | 0.01399196 | 0.13737489 | 9.81812983 |
| 81 | 246 | FHL1 | 0.30932043 | 0.03099618 | 0.10020734 |
| 82 | 247 | MSX2 | 0.26991798 | 0.51082405 | 1.89251586 |
| 83 | 248 | PAI-RBP1 | 2.81808253 | 1.95566986 | 0.69397182 |
| 84 | 249 | CLDN14 | 0.34578658 | 0.30319698 | 0.87683272 |
| 85 | 250 | ITPK1 | 0.59689657 | 0.52128465 | 0.87332492 |
| 86 | 251 | ERBB2 | 1.86323083 | 7.16756759 | 3.84684897 |
| 87 | 252 | TP53 | 0.51575976 | 1.18684511 | 2.30115879 |
| 88 | 253 | HSPA2 | 0.09735986 | 0.34190488 | 3.51176445 |
| 89 | 254 | LIG1 | 0.3244685 | 0.36453228 | 1.12347509 |
| 90 | 255 | GSS | 0.58258632 | 0.84095907 | 1.44349265 |
| 91 | 256 | PRO1843 | 0.57531505 | 0.51177072 | 0.88954864 |
| 92 | 257 | MKI67 | 2.0943328 | 2.19410145 | 1.04763744 |
| 93 | 258 | BIK | 0.50587875 | 1.55537704 | 3.0746044 |
| 94 | 259 | KIAA0225 | 2.13074615 | 2.13861404 | 1.00369255 |
| 95 | 260 | TNRC15 | 0.63566173 | 0.69130642 | 1.0875382 |
| 96 | 261 | SFRS5 | 0.55670226 | 0.25236203 | 0.45331597 |
| 97 | 262 | RPL17 | 0.67408803 | 0.65848911 | 0.97685923 |
| 98 | 263 | GNG12 | 0.39809519 | 0.35596632 | 0.89417388 |
| 99 | 264 | LAP1B | 0.59182478 | 0.87189088 | 1.47322468 |
| 100 | 265 | LOC253782 | 0.33656287 | 1.0069827 | 2.99196016 |
| 101 | 266 | COL5A1 | 0.48612506 | 1.91919073 | 3.94793618 |
| 102 | 267 | CXCL13 | 1.09334867 | 2.55193586 | 2.33405493 |
| 103 | 268 | TTS-2.2 | 0.52779839 | 0.24321886 | 0.46081774 |
| 104 | 269 | KIAA0056 | 2.15880901 | 2.32531026 | 1.07712643 |
| 105 | 270 | FLJ22642 | 0.50735263 | 0.47592636 | 0.93805833 |
| 106 | 271 | LOC113146 | 0.4322237 | 0.20955508 | 0.48483016 |
| 107 | 272 | GPR126 | 2.97045989 | 1.28374752 | 0.4321713 |
| 108 | 273 | PMSCL1 | 3.85379762 | 5.25959238 | 1.36478168 |
| 109 | 274 | KIAA0418 | 0.63562548 | 0.58234822 | 0.91618138 |
| 110 | 275 | SULF1 | 1.05390365 | 3.85641652 | 3.65917372 |
| 111 | 276 | KIAA0673 | 0.57391504 | 0.57797443 | 1.00707314 |
| 112 | 277 | FLJ10803 | 2.8794926 | 0.80518888 | 0.27962874 |
| 113 | 278 | DKFZp586M0723 | 0.13647343 | 0.11662161 | 0.85453708 |
| 114 | 279 | C4A | 0.17445163 | 0.36240753 | 2.07740986 |
| 115 | 280 | ZAP3 | 0.60561667 | 0.54605096 | 0.90164454 |
| 116 | 281 | NEK9 | 0.42385526 | 0.71295236 | 1.6820656 |
| 117 | 282 | FLJ13125 | 1.7456421 | 1.35110145 | 0.77389671 |
| 118 | 283 | FMO5 | 0.08559415 | 0.30218827 | 3.53047791 |
| 119 | 284 | COMP | 0.2912537 | 4.73047702 | 16.2417748 |
| 120 | 285 | CSPG2 | 0.59090269 | 1.88790387 | 3.19494885 |
| 121 | 286 | LOC151996 | 0.41338598 | 2.34521857 | 5.67319337 |
| 122 | 287 | TFAP2B | 0.43320817 | 1.34577659 | 3.10653554 |
| 123 | 288 | OR7E38P | 2.4721374 | 2.04397969 | 0.82680667 |
| 124 | 289 | RAB31 | 0.40394741 | 2.19420728 | 5.43191319 |
| 125 | 290 | HSPC126 | 1.62954666 | 1.26787014 | 0.77805083 |
| 126 | 291 | UMP-CMPK | 1.92778452 | 1.24300347 | 0.64478341 |
| 127 | 292 | FLJ22195 | 1.43061659 | 1.51916101 | 1.06189249 |
| 128 | 293 | DCTN4 | 0.50788607 | 0.54260141 | 1.06835262 |
| 129 | 294 | FLJ20273 | 0.38803157 | 0.89334309 | 2.30224333 |
| 130 | 295 | KIF4A | 2.22685745 | 3.35533346 | 1.50675718 |
| 131 | 296 | THTP | 0.58831486 | 0.8535722 | 1.45087649 |
| 132 | 297 | PLSCR4 | 0.3444877 | 0.14809284 | 0.42989295 |
| 133 | 298 | FLJ11323 | 2.11180669 | 1.12860006 | 0.53442394 |
| 134 | 299 | MGC11242 | 0.39970231 | 0.96317642 | 2.40973447 |
| 135 | 300 | CEGP1 | 0.06321053 | 0.22757341 | 3.6002451 |
| 136 | 301 | SRR | 0.43030252 | 0.50748029 | 1.17935701 |
| 137 | 302 | HSPC177 | 0.54280584 | 0.75044087 | 1.38252174 |
| 138 | 303 | MGC3103 | 2.49147139 | 2.67377209 | 1.0731699 |
| 139 | 304 | FLJ20641 | 2.19559981 | 2.13795703 | 0.97374623 |
| 140 | 305 | FLJ13646 | 0.50690215 | 0.68417519 | 1.34971847 |
| 141 | 306 | KCNK15 | 0.08400027 | 0.30393847 | 3.6183034 |
| 142 | 307 | RNASEL | 0.43951061 | 0.48409168 | 1.10143344 |
| 143 | 308 | CRSP6 | 1.57038515 | 1.63575579 | 1.04162714 |
| 144 | 309 | COL5A2 | 0.44650047 | 1.59810403 | 3.57917657 |
| 145 | 310 | LOC51218 | 0.59078156 | 1.08711676 | 1.84013321 |
| 146 | 311 | APBB2 | 0.34810181 | 0.3281072 | 0.94256105 |
| 147 | 312 | yy15c12.s1 | 1.37222353 | 1.42335867 | 1.03726444 |
| 148 | 313 | AD037 | 2.09401866 | 1.44748322 | 0.69124657 |
| 149 | 314 | FLJ20477 | 0.52024352 | 0.42892996 | 0.82447919 |
| 150 | 315 | MARKL1 | 1.86975496 | 1.64523021 | 0.87991755 |
| 151 | 316 | LUM | 0.81501967 | 1.26269875 | 1.54928623 |
| 152 | 317 | COL3A1 | 0.60780953 | 1.3093042 | 2.15413568 |
| 153 | 318 | COL1A1 | 0.55118736 | 1.72152105 | 3.1232956 |
| 154 | 319 | BF | 0.23831298 | 1.7123556 | 7.18532235 |
| 155 | 320 | ADAM12 | 0.53384591 | 0.70372001 | 1.31820811 |
| 156 | 321 | LOXL1 | 0.48175564 | 1.99702419 | 4.14530526 |
| 157 | 322 | CEACAM6 | 0.57151883 | 7.72858988 | 13.5228963 |
| 158 | 323 | MMP11 | 0.75362281 | 6.87206597 | 9.11870749 |
| 159 | 324 | MMP1 | 26.1407301 | 117.806871 | 4.50664042 |
| 160 | 325 | MMP13 | 0.24808412 | 2.09572957 | 8.4476569 |
| 161 | 326 | SERPINH1 | 1.28483815 | 2.27223116 | 1.76849603 |
| 162 | 327 | PITX1 | 1.54911156 | 16.9745142 | 10.9575802 |
| 163 | 328 | RAD52 | 0.66443667 | 1.71706792 | 2.58424617 |
| 164 | 329 | INHBA | 0.72936034 | 4.21043511 | 5.77277773 |
| 165 | 330 | CSPG2 | 0.77410378 | 1.86511138 | 2.40938157 |

TABLE 4a
Putative biological function of 165 marker genes

| | SEQ ID | | |
|---|---|---|---|
| SEQ ID NO: | NO: | | |
| (DNA | (Protein | | |
| Sequence) | Sequence) | Gene_Symbol | Gene Description |
| 1 | 166 | CTSB | wu69b10.x1 cathepsin B |
| 2 | 167 | SSR1 | SSR alpha subunit signal sequence receptor alpha (translocon-associated protein alpha) |
| | | | SSR alpha subunit signal sequence receptor, alpha (translocon-associated |
| 3 | 168 | STX8 | MSS1 proteasome (prosome macropain) 26S subunit ATPase 2 mammalian suppressor of sgv1; |
| | | | transactivation factor proteasome (prosome, macropain) 26S subunit, ATPase, 2 |
| 4 | 169 | KPNA2 | nuclear localization sequence receptor hSRP1alpha karyopherin alpha 2 (RAG cohort 1 |
| | | | importin alpha 1) karyopherin alpha 2 (RAG cohort 1, importin alpha 1) |
| 5 | 170 | CSE1L | brain cellular apoptosis susceptibility protein (CSE1) brain cellular apoptosis susceptibility |
| | | | protein (CSE1) d chromosome segregation 1 (yeast homolog)-like CSE1 chromosome |
| | | | segregation 1-like (yeast) |
| 6 | 171 | RHEB2 | D78132 ras-related GTP-binding protein Ras homolog enriched in brain 2 Rheb; ras-related |
| | | | GTP-binding protein Ras homologue enriched in brain; similar to rat Rheb gene ras-related |
| | | | GTP-binding protein |
| 7 | 172 | DKC1 | Cbf5p homolog (CBF5) dyskeratosis congenita 1 dyskerin nucleolar protein; |
| | | | similar to yeast Cbf5p Cbf5p homolog |
| 8 | 173 | IGFBP4 | df29g03.y1 insulin-like growth factor-binding protein 4 insulin-like growth factor |
| | | | binding protein 4 |
| 9 | 174 | SMC1L1 | KIAA0178 gene SMC1 (structural maintenance of chromosomes 1 yeast)-like 1 KIAA0178 |
| | | | similar to mitosis-specific chromosome segregation protein SMC1 of S. cerevisiae. SMC1 structural |
| | | | maintenance of chromosomes 1-like 1 (yeast) |
| 10 | 175 | PWP1 | IEF SSP 9502 nuclear phosphoprotein similar to S. cerevisiae PWP1 |
| 11 | 176 | HDAC2 | transcriptional regulator homolog RPD3 histone deacetylase 2 similar to yeast RPD3, |
| | | | encoded by GenBank Accession Number X78454 transcriptional regulator |
| | | | homolog RPD3 |
| 12 | 177 | PRKAB1 | 5-AMP-activated protein kinase beta-1 protein kinase AMP-activated beta 1 non-catalytic |
| | | | subunit protein kinase, AMP-activated, beta 1 non-catalytic subunit |
| 13 | 178 | IMPDH2 | (clone FFE-7) type II inosine monophosphate dehydrogenase (IMPDH2) gene exons |
| | | | 1-13 IMP (inosine monophosphate) dehydrogenase 2 NAD-dependent; differentiation; inosine |
| | | | monophosphate dehydrogenase; inosine-5′-monophosphate dehydrogenase; nucleotide |
| | | | biosynthesis; proliferation associated gene IMP (inosine monophosphate) dehydrogenase 2 |
| 14 | 179 | UBE2A | HUMHHR6A HHR6A (yeast RAD 6 homologue) ubiquitin-conjugating enzyme E2A |
| | | | (RAD6 homolog) |
| 15 | 180 | YR-29 | hypothetical protein clone YR-29 hypothetical protein |
| 16 | 181 | MUF1 | MUF1 protein MUF1 protein |
| 17 | 182 | MYO10 | KIAA0799 protein myosin X hg01449 cDNA clone for KIAA0799 has a 1204-bp insertion at |
| | | | position 373 of the sequence of KIAA0799. KIAA0799 protein |
| 18 | 183 | EGFR | HSEGFPRE precursor of epidermal growth factor receptor epidermal growth factor receptor |
| | | | (avian erythroblastic leukemia viral (v-erb-b) oncogene homolog) epidermal growth factor receptor; |
| | | | signal peptide epidermal growth factor receptor epidermal growth factor receptor |
| | | | (erythroblastic leukemia |
| 19 | 184 | IFRD1 | BAC clone RG163K11 from 7q31 interferon-related developmental regulator 1 nucleophosmin |
| | | | 1 (nucleolar phosphoprotein B23 numatrin) pseudogene 14 HTG similar to mouse interferon-related |
| | | | protein PC4; 96% identical to P19182 (PID: g135861); H_RG163K11.1 |
| 20 | 185 | CD2BP2 | zk74b08.r1 CD2 antigen (cytoplasmic tail)-binding protein 2 CD2 antigen (cytoplasmic tail) |
| | | | binding protein 2 |
| 21 | 186 | ARL3 | 48c8 ADP-ribosylation factor-like 3 EST |
| 22 | 187 | CCNB2 | DKFZp434B174 (from clone DKFZp434B174) cyclin B2 cyclins B2 |
| | | | hypothetical protein |
| 23 | 188 | FMOD | fibromodulin fibromodulin precursor fibromodulin Encodes only the most carboxy terminal |
| | | | 58 amino acids of fibromodulin. fibromodulin |
| 24 | 189 | SLC7A8 | SLC7A8 protein solute carrier family 7 (cationic amino acid transporter y+ system) |
| | | | member 8 solute carrier family 7 (cationic amino acid transporter, |
| 25 | 190 | E2-EPF | HUME2EPI ubiquitin carrier protein (E2-EPF) ubiquitin carrier protein |
| 26 | 191 | AGT | G angiotensinogen serine (or cysteine) proteinase inhibitor clade A (alpha-1 antiproteinase |
| | | | antitrypsin) member 8 angiotensinogen (serine (or cysteine) proteinase inhibitor, |
| 27 | 192 | FHL2 | heart protein (FHL-2) four and a half LIM domains 2 |
| 28 | 193 | LDLC | LDLC low density lipoprotein receptor defect C complementing |
| 29 | 194 | MGC16824 | hypothetical protein |
| 30 | 195 | UGDH | UDP-glucose dehydrogenase (UGDH) UDP-glucose dehydrogenase UDPGDH; |
| | | | NAD+-linked oxidoreductase UDP-glucose dehydrogenase |
| 31 | 196 | MAD2L1 | MAD2 protein MAD2 (mitotic arrest deficient yeast homolog)-like 1 MAD2 gene MAD2-like |
| | | | 1 MAD2 mitotic arrest deficient-like 1 (yeast) |
| 32 | 197 | DDB2 | HSU18300 damage-specific DNA binding protein p48 subunit (DDB2) damage-specific |
| | | | DNA binding protein 2 (48 kD) damage-specific DNA binding protein p48 subunit; implicated in |
| | | | Xeroderma pigmentosum group E DDBb p48 |
| 33 | 198 | OS4 | OS-4 protein (OS-4) conserved gene amplified in osteosarcoma |
| 34 | 199 | BCL2 | HUMBCL2A B-cell leukemia lymphoma 2 (bcl-2) proto-oncogene encoding |
| | | | bcl-2-alpha protein B-cell leukemialymphoma 2 (bcl-2) proto-oncogene encoding bcl-2-alpha |
| | | | proteind B-cell CLL/lymphoma 2 alternative splicing; bcl-2-alpha protein; proto-oncogene bcl2-alpha |
| | | | protein B-cell lymphoma protein 2 beta |
| 35 | 200 | SEMA3C | AB000220 semaphorin E sema domain immunoglobulin domain (Ig) short basic |
| | | | domain secreted (semaphorin) 3C semaphorin E sema domain, immunoglobulin domain (Ig), |
| | | | short basic domain, secreted, (semaphorin) 3C |
| 36 | 201 | DTR | heparin-binding EGF-like growth factor diphtheria toxin receptor (heparin-binding epidermal |
| | | | growth factor-like growth factor) heparin-binding EGF-like growth factor putative diphtheria toxin |
| | | | receptor (heparin-binding epidermal growth factor-like growth factor) |
| 37 | 202 | GARP | garp gene glycoprotein A repetitions predominantprecursor glycoprotein A repetitions |
| | | | predominant GARP gene; leucine-rich repeat containing protein glycoprotein A repetitions |
| | | | predominant precursor |
| 38 | 203 | ACK1 | HUMNRTYKIN activated p21cdc42Hs kinase (ack) activated p21cdc42Hs kinase |
| | | | putative activated p21cdc42Hs kinase |
| 39 | 204 | EDG2 | wc44d05.x1 endothelial differentiation lysophosphatidic acid |
| | | | G-protein-coupled receptor 2 EST |
| 40 | 205 | RARRES3 | retinoic acid receptor responder 3 (RARRES3) retinoic acid receptor responder |
| | | | (tazarotene induced) 3 putative class II tumor suppressor; growth inhibitory protein; tazarotene |
| | | | induced retinoic acid receptor responder 3 |
| 41 | 206 | CCNH | HSU11791 cyclin H cyclin H cyclin H |
| 42 | 207 | PREP | prolyl oligopeptidase prolyl endopeptidase prolyl oligopeptidase |
| | | | prolyl endopeptidase |
| 43 | 208 | COL11A1 | alpha-1 type XI collagen (COL11A1) collagen type XI alpha 1 alpha-1 type XI collagen; |
| | | | collagen; type XI collagen alpha-1 (type XI) collagen precursor collagen, type XI, alpha 1 |
| 44 | 209 | GALC | DNAgalactocerebrosidase galactosylceramidase (Krabbe disease) GALC |
| | | | galactocerebrosidase |
| 45 | 210 | HMGCS2 | 3-hydroxy-3-methylglutaryl coenzyme A synthase 3-hydroxy-3-methylglutaryl-Coenzyme |
| | | | A synthase 2 (mitochondrial) hydroxymethyl-CoA synthetase 3-hydroxy-3-methylglutaryl-Coenzyme |
| | | | A synthase 2 (mitochondrial) |
| 46 | 211 | ZNF274 | zinc finger protein zfp2 (zf2) KRAB zinc finger protein HFB101L zinc finger |
| | | | protein 274 |
| 47 | 212 | TFF1 | EST186646 trefoil factor 1 (breast cancer estrogen-inducible sequence expressed in) |
| | | | EST trefoil factor 1 (breast cancer, estrogen-inducible sequence |
| 48 | 213 | RAD51 | DKFZp564H1178_s1 RAD51 (S. cerevisiae) homolog (E coli RecA homolog) |
| | | | EST RAD51 homolog (RecA homolog, E. coli) (S. cerevisiae) |
| 49 | 214 | ASNS | asparagine synthetase asparagine synthetase asparagine synthetase |
| 50 | 215 | PCMT1 | carboxyl methyltransferase protein-L-isoaspartate (D-aspartate) O-methyltransferase |
| | | | carboxyl methyltransferase protein-L-isoaspartate (D-aspartate) O-methyltransferase |
| 51 | 216 | ESR1 | HSERR oestrogen receptor estrogen receptor 1 estrogen receptor; receptor; steroid hormone |
| | | | receptor oestrogen receptor |
| 52 | 217 | ACAT1 | MAT genemitochondrial acetoacetyl-CoA thiolase acetyl-Coenzyme A acetyltransferase 1 |
| | | | (acetoacetyl Coenzyme A thiolase) (ACAT1) nuclear gene encoding mitochondrial prote |
| 53 | 218 | XPA | HUMXPAC XPAC protein xeroderma pigmentosum complementation group A XPAC protein |
| | | | xeroderma pigmentosum, complementation group A |
| 54 | 219 | LAF4 | lymphoid nuclear protein (LAF-4) lymphoid nuclear protein related to AF4 |
| 55 | 220 | COL10A1 | COL10A1 genecollagen (alpha-1 type X) collagen type X alpha 1 (Schmid metaphyseal |
| | | | chondrodysplasia) collagen, type X, alpha 1(Schmid metaphyseal chondrodysplasia) |
| 56 | 221 | KIAA1041 | KIAA1041 protein KIAA1041 protein KIAA1041 protein |
| 57 | 222 | PLA2G7 | LDL-phospholipase A2 phospholipase A2 group VII (platelet-activating factor acetylhydrolase |
| | | | plasma) PAF- acetylhydrolase phospholipase A2, group VII (platelet-activating factor |
| | | | acetylhydrolase, plasma) |
| 58 | 223 | GRP | HUMGRP5E gastrin-releasing peptide gastrin-releasing peptide gastrin-releasing peptide |
| | | | pre-progastrin releasing peptide gastrin-releasing peptide |
| 59 | 224 | CYP2B6 | HUMCYP2BB cytochrome P450-IIB (hIIB1) cytochrome P450 subfamily IIB (phenobarbital- |
| | | | inducible) polypeptide 6 cytochrome P450 subfamily IIB (phenobarbital-inducible) cytochrome P450; |
| | | | cytochrome P450 IIB cytochrome P450-IIB cytochrome P450, subfamily IIB (phenobarbital-inducible) |
| 60 | 225 | CHAD | chondroadherin gene 5flanking region and chondroadherin precursor cartilage leucine-rich |
| | | | repeat protein chondroadherin |
| 61 | 226 | GALNT10 | DKFZp586H0623 (from clone DKFZp586H0623) hypothetical protein DKFZp586H0623 |
| | | | (DKF hypothetical protein DKFZp586H0623 similarity to N-acetylgalactosaminyltransferase,; |
| | | | The frame shift was determined manually hypothetical protein putative UDP-GalNAc:polypeptide |
| | | | N-acetylgalactosaminyltransferase |
| 62 | 227 | GADD45B | growth arrest and DNA-damage-inducible protein GADD45beta growth arrest and |
| | | | DNA-damage-inducible beta growth arrest and DNA-damage-inducible, beta |
| 63 | 228 | WBSCR20 | wh80b02.x1 putative methyltransferase |
| 64 | 229 | BTBD2 | zd42a12.s1 BTB (POZ) domain containing 2 hypothetical protein FLJ20386 EST |
| 65 | 230 | PGR | progesterone receptor |
| 66 | 231 | TBPL1 | DNA sequence from clone 73H22 on chromosome 6q23 TBP-like 1 HTG; CpG Island |
| | | | dJ73H22.1 (TBP-like protein) |
| 67 | 232 | C4B | RP1 and complement C4B precursor (C4B) genes complement component 4B |
| 68 | 233 | CCNG1 | cyclin G1 clone MGC: 6 |
| 69 | 234 | PDHB | pyruvate dehydrogenase (EC 1.2.4.1) beta subunit gene exons 1-10 pyruvate |
| | | | dehydrogenase E1-beta subunit d pyruvate dehydrogenase (lipoamide) beta |
| 70 | 235 | HNRPDL | A + U-rich element RNA binding factor for A + U-rich element RNA binding |
| | | | factord heterogeneous nuclear ribonucleoprotein D-like |
| 71 | 236 | TAF11 | wr91e02.x1 TATA box binding protein (TBP)-associated factor RNA polymerase II I |
| | | | 28 kD TAF11 RNA polymerase II, TATA box binding protein (TBP)-associated |
| 72 | 237 | AMACR | 2-methylacyl-CoA racemase alpha-methylacyl-CoA racemase d |
| | | | alpha-methylacyl-CoA racemase |
| 73 | 238 | EMD | EDMD gene emerin (Emery-Dreifuss muscular dystrophy) clone MGC: 21 emerin |
| | | | (Emery-Dreifuss muscular dystrophy) EDMD gene; emerin emerin |
| 74 | 239 | NR2F1 | V-Erba Related Ear-3 Protein nuclear receptor subfamily 2 group F member 1 |
| | | | nuclear receptor subfamily 2, group F, member 1 |
| 75 | 240 | HSF2 | HUMHSF2 heat shock factor 2 (HSF2) heat shock factor 2 (HSF2) d heat shock |
| | | | transcription factor 2 heat shock factor 2 HSF2 |
| 76 | 241 | SPG4 | KIAA1083 protein spastic paraplegia 4 (autosomal dominant spastin) KIAA1083 |
| | | | protein spastic paraplegia 4 (autosomal dominant; spastin) |
| 77 | 242 | TRIP11 | Golgi-associated microtubule-binding protein (GMAP-210) thyroid hormone |
| | | | receptor interactor 11 GMAP-210 gene; Golgi-associated microtubule-binding protein |
| | | | Golgi-associated microtubule-binding protein |
| 78 | 243 | OCLN | wr26e08.x1 tight junction protein occludin d occludin EST |
| 79 | 244 | CACNA1D | wt59c07.x1 calcium channel voltage-dependent L type alpha 1D subunit |
| | | | ESTs calcium channel, voltage-dependent, L type, alpha 1D |
| 80 | 245 | CYP2B7 | cytochrome P450-IIB (hIIB3) ds cytochrome P450, subfamily IIB |
| | | | (phenobarbital-inducible), |
| 81 | 246 | FHL1 | LIM protein SLIMMER LIM protein SLIMMER d four and a half LIM domains |
| | | | 1 skeletal and cardiac muscle SLIM isoform LIM protein SLIMMER |
| 82 | 247 | MSX2 | MSX-2 msh (Drosophila) homeo box homolog 2 msh homeo box homolog 2 |
| | | | (Drosophila) |
| 83 | 248 | PAI-RBP1 | DKFZp564M2423 (from clone DKFZp564M2423) Similar to DKFZP564M2423 |
| | | | protein clone MGC: 13 DKFZP564M2423 protein |
| 84 | 249 | CLDN14 | CLDN14 gene claudin 14 (CLDN14) d claudin 14 claudin-14; CLDN14 |
| | | | gene claudin-14 |
| 85 | 250 | ITPK1 | inositol 1 3 4-trisphosphate 5 6-kinase inositol 1 3 4-trisphosphate 56-kinase d |
| | | | inositol 1 3 4-triphosphate 5/6 kinase inositol 1,3,4-triphosphate 5/6 kinase |
| 86 | 251 | ERBB2 | tyrosine kinase-type receptor (HER2) v-erb-b2 avian erythroblastic leukemia |
| | | | viral oncogene homolog 2 (neuroglioblastoma derived oncogene homolog) v-erb-b2 avian |
| | | | erythroblastic leukemia viral oncogene homolog 2 (neuro/glioblastoma derived oncogene |
| | | | homolog) tyrosine kinase HER2 receptor v-erb-b2 avian erythroblastic leukemia viral |
| | | | oncogene homolog 2 (neuro/glioblastoma derived oncogene homolog) |
| 87 | 252 | TP53 | HSP53 p53 cellular tumor antigen p53 cellular tumor antigen d tumor protein p53 |
| | | | (Li-Fraumeni syndrome) antigen; tumor antigen p53 tumor antigen (aa 1-?) tumor protein p53 |
| 88 | 253 | HSPA2 | HUMHSPA2A heat shock protein HSPA2 gene heat shock protein d heat |
| | | | shock 70 kD protein 2 |
| 89 | 254 | LIG1 | DKFZp434N0910_s1 for membrane glycoprotein LIG-1d DKFZP586O |
| | | | 1624 protein EST |
| 90 | 255 | GSS | wt55b10.x1 (clone pGSH1) glutathione synthetase (gsh-s) d glutathione |
| | | | synthetase |
| 91 | 256 | PRO1843 | initiation factor 4B eukaryotic translation initiation factor 4B |
| 92 | 257 | MKI67 | HSMKI67 mki67a (long type) antigen of monoclonal antibody Ki-67 antigen |
| | | | identified by monoclonal antibody Ki-67 |
| 93 | 258 | BIK | HSU34584 Bcl-2 interacting killer (BIK) BCL2-interacting killer (apoptosis-inducing) |
| | | | Bik (Bcl-2 interacting killer); Bcl-2 homology 3 (BH3) domain Bik interacts with the survival |
| | | | proteins Bcl-2, Bcl-xL, EBV-BHRF1 and adenovirus E1B 19 kD; This protein is identical with |
| | | | that described by Robin Brown and colleagues (personal communication) which is a |
| | | | Human NBK apoptotic inducer protein, encoded by GenB Bik |
| 94 | 259 | KIAA0225 | KIAA0225 gene KIAA0225 protein |
| 95 | 260 | TNRC15 | KIAA0642 protein trinucleotide repeat containing 15 |
| 96 | 261 | SFRS5 | zc81g05.s1 splicing factor arginineserine-rich 5 ESTs |
| 97 | 262 | RPL17 | L23 putative ribosomal protein ribosomal protein L17 ribosomal protein |
| | | | putative ribosomal protein (AA 1-184) ribosomal protein L17 |
| 98 | 263 | GNG12 | DKFZp586B0918 (from clone DKFZp586B0918) DKFZp586B0918 |
| | | | Zp586B0918) |
| 99 | 264 | LAP1B | UI-H-BI0-aao-g-10-0-UI.s1 FLJ11551 fis clone HEMBA1002999 |
| | | | moderately similar to Rattus norvegicus lamina associated polypeptide 1C (LAP1C) |
| | | | mRN DKFZP586G011 protein |
| 100 | 265 | LOC253782 | DKFZp434B102 (from clone DKFZp434B102): FLJ21238 fis clone |
| | | | COL01115 Homo sapiens mRNA; cDNA DKFZp434B102 (from clone DKFZp434B102) |
| 101 | 266 | COL5A1 | pro-alpha-1 (V) collagen collagen type V alpha 1 |
| 102 | 267 | CXCL13 | B lymphocyte chemoattractant BLC small inducible cytokine B subfamily |
| | | | (Cys-X-Cys motif) member 13 (B-cell chemoattractant) small inducible cytokine B |
| | | | subfamily (Cys-X-Cys motif), |
| 103 | 268 | TTS-2.2 | clone 24519 unknown transport-secretion protein 2.2 |
| 104 | 269 | KIAA0056 | KIAA0056 gene KIAA0056 protein |
| 105 | 270 | FLJ22642 | we38g03.x1: FLJ22642 fis clone HSI06970 EST |
| 106 | 271 | LOC113146 | 47g10 ESTs |
| 107 | 272 | GPR126 | DNA sequence from clone 287G14 on chromosome 6q23.1-24.3. Contains |
| | | | a novel seven transmembrane domain protein gene and an exon similar to parts of BMP and |
| | | | Tolloid genes. Contains ESTs an STS and GSSs DNA sequence from clone 287G14 on |
| | | | chromosome 6q23.1-24.3. Contains a novel seven transmembrane domain protein gene |
| | | | and an exon similar to parts of BMP and Tolloid genes. Contains ESTs an STS and GS |
| | | | Human DNA sequence from clone 287G14 on chromosome 6q23.1-24.3. Contains a novel |
| | | | seven transmembrane domain protein gene and an exon similar to parts of BMP and Tolloid |
| | | | genes. Contains ESTs an STS and GSSs HTG; BMP; seven transmembrane domain; Tolloid |
| | | | supported by GENSCAN and FGENES dJ287G14.1 (exon of a yet unidentified gene, or part |
| | | | of a pseudogene?; similar to parts of BMP and Tolloid proteins) |
| 108 | 273 | PMSCL1 | tx67e10.x1 polymyositisscleroderma autoantigen 1 (75 kD) EST Weakly similar to |
| | | | JH0446 75K autoantigen - human□ [H. sapiens] |
| 109 | 274 | KIAA0418 | wi34b03.x1 KIAA0418 gene product EST |
| 110 | 275 | SULF1 | KIAA1077 protein KIAA1077 protein KIAA1077 protein |
| 111 | 276 | KIAA0673 | KIAA0673 protein for KIAA0673 proteind KIAA0673 protein |
| | | | KIAA0673 protein |
| 112 | 277 | FLJ10803 | ni36d11.s1 hypothetical protein FLJ10803 ESTs |
| 113 | 278 | DKFZp586M0723 | DKFZp586M0723 (from clone DKFZp586M0723) |
| | | | DKFZp586M0723 Zp586M0723) |
| 114 | 279 | C4A | RP1 and complement C4B precursor (C4B) genes complement component |
| | | | C4A d complement component 4B complement component 4A |
| 115 | 280 | ZAP3 | (clone zap3) of cds and unknown ge ZAP3 protein ORF; putative |
| 116 | 281 | NEK9 | Untitled hypothetical protein MGC16714 |
| 117 | 282 | FLJ13125 | FLJ13125 fis clone NT2RP3002877 |
| 118 | 283 | FMO5 | flavin-containing monooxygenase 5 (FMO5) FLJ12110 fis clone MAMMA1000020 |
| | | | highly similar to for flavin-containing monooxygenase 5 (FMO5 flavin containing monooxygenase |
| | | | 5 flavin-containing monooxygenase 5 flavin containing monooxygenase 5 |
| 119 | 284 | COMP | germline oligomeric matrix protein (COMP) cartilage oligomeric matrix protein |
| | | | (pseudoachondroplasia epiphyseal dysplasia 1 multiple) cartilage oligomeric matrix protein |
| | | | (pseudoachondroplasia, |
| 120 | 285 | CSPG2 | pgH3 proteoglycan PG-M(V3) chondroitin sulfate proteoglycan 2 (versican) PG-M; |
| | | | proteoglycan PG-M(V3); large chondroitin sulfate proteoglycan; pgH3; major extracellular matrix |
| | | | molecule proteoglycan PG-M(V3) |
| 121 | 286 | LOC151996 | zv97h07.s1 FLJ12280 fis clone MAMMA1001744 EST |
| 122 | 287 | TFAP2B | transcription factor AP-2 beta (activating enhancer-binding protein 2 beta) |
| | | | transcription factor AP-2 beta (activating enhancer binding |
| 123 | 288 | OR7E38P | OR7E12P pseudogene complete sequence olfactory receptor family 7 |
| | | | subfamily E member 38 pseudogene olfactory receptor family 7 subfamily E member 12 |
| | | | pseudogene olfactory receptor |
| 124 | 289 | RAB31 | low-Mr GTP-binding protein (RAB31) RAB31 member RAS oncogene family |
| | | | Low Mr GTP-binding protein of the Rab subfamily low-Mr GTP-binding protein Rab31 RAB31, |
| | | | member RAS oncogene family |
| 125 | 290 | HSPC126 | wq62d04.x1 HSPC126 protein |
| 126 | 291 | UMP-CMPK | ws85a09.x1 UMP-CMP kinase EST |
| 127 | 292 | FLJ22195 | DKFZp762L203_s1 hypothetical protein FLJ22195 Homo sapiens |
| | | | cDNA: FLJ22195 fis clone HRC01166 |
| 128 | 293 | DCTN4 | wz58c04.x1 dynactin p62 subunit dynactin 4 (p62) |
| 129 | 294 | FLJ20273 | nh92d01.s1 hypothetical protein EST |
| 130 | 295 | KIF4A | zh97c02.s1 kinesin family member 4A EST |
| 131 | 296 | THTP | yi24d06.r1 hypothetical protein MGC2652 ESTs |
| 132 | 297 | PLSCR4 | wk77f02.x1 phospholipid scramblase 4 EST |
| 133 | 298 | FLJ11323 | ac16g07.s1 hypothetical protein FLJ11323 EST |
| 134 | 299 | MGC11242 | zh46f04.r1 hypothetical protein MGC11242 ESTs |
| 135 | 300 | CEGP1 | wv11f12.x1 CEGP1 protein |
| 136 | 301 | SRR | wq60g02.x1 serine racemase Homo sapiens cDNA FLJ13107 fis clone |
| | | | NT2RP3002501 weakly similar to THREONINE DEHYDRATASE CATABOLIC |
| | | | (EC 4.2.1.16) EST |
| 137 | 302 | HSPC177 | wn81b08.x1 hypothetical protein CGI-34 protein hypothetical |
| | | | protein HSPC177 |
| 138 | 303 | MGC3103 | ws44f11.x1 hypothetical protein MGC3103 ESTs |
| 139 | 304 | FLJ20641 | qi31h03.x1 hypothetical protein FLJ20641 |
| 140 | 305 | FLJ13646 | tg49h03.x1 hypothetical protein FLJ13646 Homo sapiens cDNA FLJ13646 |
| | | | fis clone PLACE1011325 EST |
| 141 | 306 | KCNK15 | two pore potassium channel KT3.3 |
| 142 | 307 | RNASEL | ribonuclease L (2 5-oligoisoadenylate synthetase-dependent) ribonuclease |
| | | | L (2′,5′-oligoisoadenytate synthetase-dependent) |
| 143 | 308 | CRSP6 | C05931 cofactor required for Sp1 transcriptional activation subunit 6 (77 kD) |
| | | | EST cofactor required for Sp1 transcriptional activation, |
| 144 | 309 | COL5A2 | yl92e08.r1 collagen type V alpha 2 TRIAD3 protein EST |
| 145 | 310 | LOC51218 | wr52b07.x1 clone FLB4739 EST |
| 146 | 311 | APBB2 | DKFZp434E033 (from clone DKFZp434E033) FE65-like protein (hFE65L) |
| | | | Homo sapiens mRNA; cDNA |
| 147 | 312 | yy15c12.s1 | DKFZp434E033 (from clone DKFZp434E033) amyloid beta (A4) |
| | | | precursor protein-binding, family B, yy15c12.s1 ESTs |
| 148 | 313 | AD037 | FE65-LIKE 2 AD037 protein |
| 149 | 314 | FLJ20477 | zx56a06.r1 hypothetical protein FLJ20477 EST |
| 150 | 315 | MARKL1 | DKFZp761B169_s1 ESTs MAP/microtubule affinity-regulating |
| | | | kinase like 1 |
| 151 | 316 | LUM | lumican lumican lumican |
| 152 | 317 | COL3A1 | pro-alpha-1 type 3 collagen collagen type III alpha 1 (Ehlers-Danlos syndrome |
| | | | type IV autosomal dominant) COL3A1 gene; collagen; collagen alpha 1 type III; collagen type III |
| | | | prepro-alpha-1 type 3 collagen |
| 153 | 318 | COL1A1 | prepro-alpha1(I) collagen proalpha 1 (I) chain of type I procollagen |
| | | | (partial collagen type I alpha 1 alpha1(I)-collagen collagen, type I, alpha 1 |
| 154 | 319 | BF | complement factor B B-factor properdin complement factor; complement factor B |
| | | | B-factor, properdin |
| 155 | 320 | ADAM12 | meltrin-L precursor (ADAM12) a disintegrin and metalloproteinase domain 12 |
| | | | (meltrin alpha) (ADAM12) transcript variant a disintegrin and metalloproteinase domain 12 |
| | | | (meltrin alpha) |
| 156 | 321 | LOXL1 | lysyl oxidase-like protein gene lysyl oxidase-like 1 lysyl oxidase-like 1 |
| 157 | 322 | CEACAM6 | nonspecific crossreacting antigen carcinoembryonic antigen-related cell adhesion |
| | | | molecule 6 (non-specific cross reacting antigen) clone MGC: 104 nonspecific cross-reacting antigen |
| | | | ORF1 non-specific cross reacting antigen |
| 158 | 323 | MMP11 | stromelysin-3 matrix metalloproteinase 11 (stromelysin 3) |
| 159 | 324 | MMP1 | skin collagenase matrix metalloproteinase 1 (interstitial collagenase) |
| 160 | 325 | MMP13 | collagenase 3 matrix metalloproteinase 13 (collagenase 3) |
| 161 | 326 | SERPINH1 | colligin (a collagen-binding protein) serine (or cysteine) proteinase inhibitor |
| | | | clade H (heat shock protein 47) member 1 collagen-binding protein; colligin colligin serine |
| | | | (or cysteine) proteinase inhibitor, clade H (heat |
| 162 | 327 | PITX1 | hindlimb expressed homeobox protein backfoot (Bft) paired-like homeodomain |
| | | | transcription factor 1 paired-like homeodomain transcription factor 1 |
| 163 | 328 | RAD52 | DKFZp564I1922 (from clone DKFZp564I1922) adlican d DKFZP564I1922 |
| | | homolog | protein similarity to perlecan hypothetical protein |
| 164 | 329 | INHBA | erythroid differentiation protein (EDF) inhibin beta A (activin A activin AB alpha |
| | | | polypeptide) inhibin, beta A (activin A, activin AB alpha polypeptide) |
| 165 | 330 | CSPG2 | the chondroitin sulphate proteoglycan versican V1 splice-variant precursor |
| | | | peptide chondroitin sulfate proteoglycan 2 (versican) |

TABLE 4b
Putative biological function of 20 nonresponder marker genes

| | SEQ ID | | |
|---|---|---|---|
| SEQ ID NO: | NO: | | |
| (DNA | (Protein | | |
| Sequence) | Sequence) | Gene_Symbol | Gene Description |
| 472 | 492 | PRG1 | hematopoetic proteoglycan core protein proteoglycan 1 secretory granule haematopoetic proteoglycan core |
| | | | protein hematopoetic proteoglycan core protein (AA 1-158) proteoglycan 1, secretory granule |
| 473 | 493 | GBP1 | guanylate binding protein isoform I (GBP-2) guanylate binding protein 1 interferon-inducible 67 kD |
| | | | guanylate binding protein isoform I guanylate binding protein 1, interferon-inducible, 67 kD |
| 474 | 494 | ALEX2 | KIAA0512 protein KIAA0512 gene product ALEX2 KIAA0512 gene product KIAA0512 protein |
| | | | KIAA0512 gene product armadillo repeat protein ALEX2 |
| 475 | 495 | CD53 | CD53 glycoprotein CD53 antigen |
| 476 | 496 | VCAM1 | vascular cell adhesion molecule-1 (VCAM1) gene vascular cell adhesion molecule 1 |
| 477 | 497 | MAPT | HUMTAUA microtubule-associated protein tau microtubule-associated protein tau epitope |
| | | | microtubule-associated protein tau microtubule-associated protein tau, isoform 2 |
| 478 | 498 | EGR2 | early growth response 2 protein (EGR2) early growth response 2 (Krox-20 (Drosophila) homolog) EGR2 |
| | | | gene; early growth response protein early growth response 2 protein early growth response 2 (Krox-20 |
| | | | homolog, Drosophila) |
| 479 | 499 | TDO2 | tryptophan oxygenase (TDO) tryptophan 2 3-dioxygenase tryptophan 2,3-dioxygenase |
| 480 | 500 | ADAMDEC1 | disintegrin-protease disintegrin protease disintegrin; protease disintegrin protease |
| 481 | 501 | TFEC | TFEC isoform (or TFECL) transcription factor EC TFEC TFEC isoform (or TFECL) |
| 482 | 502 | BTF3 | Transcription Factor Btf3b basic transcription factor 3 |
| 483 | 503 | FLNB | yi17d08.r1 filamin B beta (actin-binding protein-278) Homo sapiens mRNA; cDNA DKFZp586J021 |
| | | | (from clone DKFZp586J021) EST filamin B, beta (actin binding protein 278) |
| 484 | 504 | TFRC | transferrin receptor transferrin receptor (p90 CD71) clone MGC: 31 transferrin receptor (p90 CD71) |
| | | | transferrin receptor put. transferrin receptor (aa 1-760) transferrin receptor (p90, CD71) |
| 485 | 505 | EIF4B | eukaryotic translation initiation factor 4B |
| 486 | 506 | MAPK3 | HSERK1 ERK1 protein serine threonine kinase ERK1 for protein serinethreonine kinas mitogen-activated |
| | | | protein kinase 3 erk1 gene; protein-serine/threonine kinase protein serine/threonine kinase |
| 487 | 507 | LOC161291 | DKFZp564D1462 (from clone DKFZp564D1462) DKFZp564D1462 Zp564D1462) |
| 488 | 508 | SLC1A1 | High affinity glutamate transporter, important for reuptake of glutamate and has a role in excitatory |
| | | | neurotransmission |
| 489 | 509 | MST4 | serinethreonine protein kinase MASK (LOC51765), mRNA. |
| 490 | 510 | BLAME | BCM-like membrane protein precursor (SBBI42), mRNA. |
| 491 | 511 | NME7 | NME7 |

TABLE 5a
Primer and Probe sequences

| | | | | | | | |
|---|---|---|---|---|---|---|---|
| SEQ ID | SEQ ID | SEQ ID | SEQ ID | | | | |
| NO: | NO: | NO: | NO: | Gene_ | | | |
| (DNA) | (Probe) | (Primer 1) | (Primer 2) | Symbol | Probe | Forward Primer | Reverse Primer |

| | | | | | | | |
|---|---|---|---|---|---|---|---|
| 4 | 331 | 332 | 333 | KPNA2 | TCCTGCCCTAAGAGCCATA | GAGCTTCTGAATTGCCAA | GAGTCTGTTCATCTGTAC |
| | | | | | GGGAA | TTGTG | CAGTGACA |
| 5 | 334 | 335 | 336 | CSE1L | CTGCAGCTGACAAAATTCC | GCATTCTTAGAACGCGGT | TTGGATGCAATCAGCTTC |
| | | | | | TGGGTTACTAGGT | TCA | TGA |
| 6 | 448 | 449 | 450 | RHEB2 | ATTATCCTTCGAAAAACAT | AGCTTTTTTGGAATCTTC | GCCCCGTCCATTTTTTCT |
| | | | | | CCACAGCAGTCTG | TGCTAAA | G |
| 7 | 337 | 338 | 339 | DKC1 | TCTCGCTTCCGCTTCGCAG | GCAGGTAGTTGCCGAAGC | TGGAGGAGTCTCGTCACT |
| | | | | | TTTTTG | A | TTCA |
| 8 | 340 | 341 | 342 | IGFBP4 | TCTCCATTAGGCACATTCA | GGGTGGGAAGAAAGAATG | ACCCAGGAAGCCCCTCAT |
| | | | | | GTCCACT | CAA | C |
| 11 | 343 | 344 | 345 | HDAC2 | CCAAAGGAACCAAATCAGA | CCAAGGACAACAGTGGTG | GAAATTGGTGAGACTGTC |
| | | | | | ACAGCTCA | AAAA | AAATTCAG |
| 12 | 346 | 347 | 348 | PRKAB1 | AGTCGCCACAGATGTACCC | TTCTGTATACGCAGCTCA | CTTCCGCTGACTCACAGC |
| | | | | | ACTAGCCC | GTTTCC | AA |
| 13 | 349 | 350 | 351 | IMPDH2 | AAGAGCTTGACCCAAGTCC | CACTCATGCCAGGACATT | CAAACTTAAGCTCCCCAG |
| | | | | | GAGCCAT | GGT | AGTACAT |
| 15 | 352 | 353 | 354 | YR-29 | CAAGAAAACCACCTAAATA | TGCTTTGTTGGAGATGGC | TTGAAACGCAAGCCCATT |
| | | | | | TGAAAGATTCATC | TTT | G |
| 22 | 355 | 356 | 357 | CCNB2 | AACTTAACTAAATTCATCG | TGGCCAAGAATGTGGTGA | TCAGGAGTTTGCTGCTTG |
| | | | | | CCATCAAGAA | AAG | CA |
| 23 | 358 | 359 | 360 | FMOD | AGAAGATCCCCCCAGTCAA | TCCTTGAGCTAGACCTCT | ACTCATTGATCCTATTGC |
| | | | | | CACCAACC | CCTACAA | CTTGGA |
| 24 | 361 | 362 | 363 | SLC7A8 | CATCCAACGCCGTCGCTGT | TGTCTTTGCCAATGTCGC | AACAGAAATGGGCATGAT |
| | | | | | GAC | TTA | CCA |
| 25 | 364 | 365 | 366 | E2-EPF | TCGGATGCCCAGCTCAGCC | TGCGTCAACGTGCTCAAG | GGCACTTGATGGTCAGCA |
| | | | | | G | AG | GTAC |
| 26 | 367 | 368 | 369 | AGT | AAAGTGAGACCCTCCACCT | GCTGATCCAGCCTCACTA | AGATCCTTGCAGCACCAG |
| | | | | | TGTCCAGGT | TGC | TTG |
| 27 | 370 | 371 | 372 | FHL2 | CATGCCATGCAGTGCGTTC | GTGTGCCCTGCTATGAGA | CCCCTCCCGTGGTGATG |
| | | | | | AG | AACA | |
| 29 | 373 | 374 | 375 | MGC16824 | AGCCAGGAGACGTACCTTT | GGGAGGACAACAGCGATG | CCCCGTAGAGGCTGTCGT |
| | | | | | ACCACATAGA | AG | T |
| 31 | 376 | 377 | 378 | MAD2L1 | CACAGCTACGGTGACATTT | AAATCCGTTCAGTGATCA | CAGATCAAATGAACAAGA |
| | | | | | CTGCCACTG | GACAGA | AACTTCCA |
| 32 | 379 | 380 | 381 | DDB2 | TCTCAGAATGCACAAAAAG | TGAACATGGACGGCAAAG | CCAATCACAGCATGGGTT |
| | | | | | AAAGTGACGCA | AG | CAG |
| 40 | 382 | 383 | 384 | RARRES3 | CCAAGCGCCGTGGCCA | CAGGTGGAAAAGGCCAAG | AAGAGCATCCAGCAACAA |
| | | | | | | GT | CCA |
| 43 | 385 | 386 | 387 | COL11A1 | TCTATACCATCCTTATTCA | GTGCCACCAACCCATTTT | GTATTTCCTAAATGGTAC |
| | | | | | AAACTTGCAT | G | CTGTATATGCA |
| 50 | 388 | 389 | 390 | PCMT1 | ACAGGCAATATCAATCTTC | CCCCAGGCGCTAATAGAT | CTGCTCCAACATTTGGTT |
| | | | | | CTCCGGGCT | CA | TCC |
| 51 | 391 | 392 | 393 | ESR1 | ATGCCCTTTTGCCGATGCA | GCCAAATTGTGTTTGATG | GACAAAACCGAGTCACAT |
| | | | | | | GATTAA | CAGTAATAG |
| 55 | 394 | 395 | 396 | COL10A1 | TCCCCCTGAAAAGTGAGCA | CAGATTTGAGCTATCAGA | AAATTCAAGAGAGGCTTC |
| | | | | | GCAACGTA | CCAACAA | ACATACG |
| 58 | 397 | 398 | 399 | GRP | CGTTCTGCAAGCATCAGTT | AGAGAAAAACAAAACCCC | GCACAAGGAAATCTTGTT |
| | | | | | CTACG | TAAGAGACT | GATGAT |
| 61 | 400 | 401 | 402 | GALNT10 | CCACAGCATGAAGGGCAAC | GCCCTGTCACGCTGTACG | TCTTGTCTTTGCGGTATT |
| | | | | | CAGC | A | TCCA |
| 65 | 403 | 404 | 405 | PGR | TTGATAGAAACGCTGTGAG | AGCTCATCAAGGCAATTG | ACAAGATCATGCAAGTTA |
| | | | | | CTCGA | GTTT | TCAAGAAGTT |
| 68 | 406 | 407 | 408 | CCNG1 | ATGAAGGTACAGCCCAAGC | GCTGTGAATTTACTGGAC | AAATAAAAGCAGCTCAGT |
| | | | | | ACCTTGGG | AGATTCC | CCAACA |
| 69 | 409 | 410 | 411 | PDHB | ATCCTGGCACAGATTTCAG | GAAGGAGGCTGGCCACAG | TTGAACGCAGGACCTTCC |
| | | | | | CTCCTACTCCA | T | AT |
| 74 | 412 | 413 | 414 | NR2F1 | TGTACAGAATATATCCACA | TAAAACAGAAGGAAACTA | CAGTCCACTTCCATATGT |
| | | | | | TCCGTCCACAATAAATCCT | ATGGACCTT | GTTGTTC |
| 81 | 415 | 416 | 417 | FHL1 | CACTTCACGCAATGCTTGG | TGCGTGACTTGCCATGAG | GGTAAGTGATTCCTCCAG |
| | | | | | CA | A | ATGTGA |
| 82 | 418 | 419 | 420 | MSX2 | CAAACAGCCCATTAAGTTC | CAGAAGGTAAAGCCATGT | GGGACAGATGGACAGGAA |
| | | | | | CCTGG | TTTGACT | GGT |
| 83 | 421 | 422 | 423 | PAI-RBP1 | CTGATGTGGATGACCCAGA | ACCGACAAGTCAAGTGCT | GGTTGTCTTATGGCATCC |
| | | | | | GGCATTCC | TCTG | AGTTAA |
| 92 | 424 | 425 | 426 | MKI67 | TTTCTGATTCTGCATGAGA | GAGAGCGGAGGGCAGAAG | GAGAGCGGAGGGCAGAAG |
| | | | | | ACCTTCGCA | A | A |
| 98 | 427 | 428 | 429 | GNG12 | CCCCACCCCTCTGCTGGTC | CCAGATGCCTTGGTCCAA | GCAGCTTATAGCACCAAC |
| | | | | | CTG | AG | ACGTT |
| 100 | 430 | 431 | 432 | LOC253782 | CCCAAAGTTTCATAAAGCC | AATGGAAAACAACCTCTG | TGTGGGCAAAGAGTTGAT |
| | | | | | CCTAAGCTCATGA | AGTTTGA | GAAA |
| 101 | 433 | 434 | 435 | COL5A1 | CTTCGTGAGTGTCCCGTGC | CTCGTACCTCAGCATGCC | GTGCCGAGGCGTAGATGA |
| | | | | | AC | ATT | AG |
| 104 | 436 | 437 | 438 | KIAA0056 | ACGTGCAGTCAGGTGTCTT | CATCGGAGTCGGAGCTTA | CTCGCCATTCGACTCTTG |
| | | | | | CATACA | GG | CT |
| 105 | 439 | 440 | 441 | FLJ22642 | AATTCTAATGTAGCAAAAC | TGAAACGATTAGCTGTAG | CAGTAGATTTACCACACA |
| | | | | | GTAACCA | CCAAATT | TATTGCATTTT |
| 106 | 442 | 443 | 444 | LOC113146 | AACATAGTTTTCCTATTTC | GGTGTACAAGTCGTTTTT | GCTAAGTGAGTAGGAAAC |
| | | | | | AGGCAGAGTGCGGTATATT | GGTATAACTTC | AGTGTTTCC |
| | | | | | C | | |
| 108 | 445 | 446 | 447 | PMSCL1 | TGTTTCTACACCTGTGCTA | TGAAGCAGAACCTCCTTC | TCCAATTTGGGCAGTTCC |
| | | | | | TGGACTC | AGAAG | A |
| 113 | 451 | 452 | 453 | DKFZp586 | CAGACTAGCCATGACTTGA | AAAGAGCGTATGAAAAGT | TGACAAACACGACATAAA |
| | | | | M0723 | ATGCCAGCA | ACGTTAGACTT | TAACACACA |
| 124 | 454 | 455 | 456 | RAB31 | TTCCCCTGAAGGATGCTAA | AACAAGTGCGACCTCTCA | AACCACGATGGCACCTAT |
| | | | | | GGAATACGCT | GATATT | GG |
| 128 | 457 | 458 | 459 | DCTN4 | CACCTCATCTAATATAAAA | TCAATACCTGCAGCTGGT | GGTGCATACTGACTAGCA |
| | | | | | AAGGCAA | GAAT | TTAAAATTT |
| 129 | 460 | 461 | 462 | FLJ20273 | TCATCCCCTGACTGTGTGA | GACCAAATGTAATTCGGA | GAAACTCTGTGACAATCC |
| | | | | | AAAAAGTA | TCAGATC | TTCACTAGA |
| 132 | 463 | 464 | 465 | PLSCR4 | TTTTGAAAGATCTCCACCA | CTTGCTTCCTCATTGACT | GGCTTGCTGTGTCTCTCT |
| | | | | | CAACGT | TCATGT | ATCTTG |
| 133 | 466 | 467 | 468 | FLJ11323 | CCGCCGCGTCCCGAACT | GTGCTGACGGGACCCTTC | ACGAGAGCGAAACTCCAT |
| | | | | | | T | TTG |
| 138 | 469 | 470 | 471 | MGC3103 | CCCTGACTTCCGCAACATG | GCTGGCTGACAACTTCAT | GATGGCATTGCGAGACAG |
| | | | | | ACGG | CCA | TGT |

TABLE 5b
Primer and Probe sequences

| SEQ ID | SEQ ID | SEQ ID | SEQ ID | | | | |
|---|---|---|---|---|---|---|---|
| NO: | NO: | NO: | NO: | Gene_ | | | |
| (DNA) | (Probe) | (Primer 1) | (Primer 2) | Symbol | Probe | Forward Primer | Reverse Primer |
| 472 | 512 | 513 | 514 | PRG1 | CCCTCATCCTGGTTCTGGA | TCGGCTTGTCCTGGCTCT | TGGCTCTCCGCGTAGGAT |
| | | | | | ATCCTCAG | T | AA |
| 473 | 515 | 516 | 517 | GBP1 | CTTGGCCAGACCAATGCCC | CAGAGTCTTAGGTAAAAG | TGTCCTTGATATTGGGAC |
| | | | | | A | TCTTGGGAAA | ATTGTAG |
| 474 | 518 | 519 | 520 | ALEX2 | TTTTACTGGTTCTTCTGAA | AATCGTGCTGCTTGGATA | CAAATAATAGAACAGTAG |
| | | | | | TTGACAGTAAACCTGTCC | GAAATA | GCCATTCATAA |
| 475 | 521 | 522 | 523 | CO53 | TTTCGCATAGCAACCCTCC | CAGCATCTTGCCCCTCAG | AATTGGAATGAAACCACA |
| | | | | | ACTTTTCG | A | GTCTTG |
| 476 | 524 | 525 | 526 | VCAM1 | AAATGCCCATCTATGTCCC | TCCCTGAATGTATTGAAC | TTCAGGCAGCAAGTTTTA |
| | | | | | TTGC | TTGGAA | CTTTGA |
| 477 | 527 | 528 | 529 | MAPT | ATGGCAGCAGTTCCAACCT | CCCTCTGCTCCACAGAAA | GGTCTGCAAAGTGGCCAA |
| | | | | | TCAGAACTCAATA | CC | AAT |
| 478 | 530 | 531 | 532 | EGR2 | TCCCAAGCCATAAAGTGCA | GGACAGCAAAAAGACAAG | CTGTACAATGTCCCCCAA |
| | | | | | CAT | CAAA | ATCA |
| 479 | 533 | 534 | 535 | TDO2 | ATTCACTGATGACCAAATG | CAGTTGCTGACTTCTCTT | ATTCTGTGCACCATGCAC |
| | | | | | GAGATATAACC | ATGGACAT | ACA |
| 480 | 536 | 537 | 538 | ADAMDEC1 | AGTATCTGAGTTCAAAATT | TCCCTCTGGCAGTTGTGT | TGCACGGCAAGATGTACT |
| | | | | | CCCAAAGGA | GA | GAA |
| 481 | 539 | 540 | 541 | TFEC | CAGCGCATATCAGGATCAT | AATCAAGGAGCTTGGCAC | GATGCTTTTAGAATGGTT |
| | | | | | TAGACTTT | TCTT | CCTTTGTT |
| 482 | 542 | 543 | 544 | BTF3 | TTCGGCCAGTCTCCTTAAA | ACCAGCTTGGTGCGGATA | GTGCTTTTCCATCCACAG |
| | | | | | CTAGTCA | GT | ATTG |
| 483 | 545 | 546 | 547 | FLNB | CAGCAAAGCTGGCTCCAAC | TGTGGGCCAGAAGAGTTC | CCCATGGACCCCGATCA |
| | | | | | ATGCTG | CT | |
| 484 | 548 | 549 | 550 | TFRC | AGCTCCGTGAGTGAACCAT | GCCTACCCATTCGTGGTG | TCCCTAGGAGGCCGTTTC |
| | | | | | CATTATAAACGTG | AT | C |
| 485 | 551 | 552 | 553 | EIF4B | CCCACCACTTGTAGGGGAC | CTCGATCTCAGAGCTCAG | GCATTCATCCCATCTACT |
| | | | | | TGCT | ACACA | TTATTTTCAT |
| 486 | 554 | 555 | 556 | MAPK3 | CAGTGGCCGAGGAGCCCTT | AGTACTATGACCCGACGG | TCAGCCGCTCCTTAGGTA |
| | | | | | CAC | ATGAG | GGT |
| 487 | 557 | 558 | 559 | LOC161291 | CACCAGCCACTTTGCTAAT | GAACGATGATCTTAAAGG | TCTTGCTGCAATGTAAAT |
| | | | | | TTCTT | CACAAA | CTGCTAT |
| 488 | 560 | 561 | 562 | SLC1A1 | AGAAAAAGAGCTTCCCCTA | TGGGTTGAACAAGCCACG | GTCGTGGGATTTACTCTG |
| | | | | | ACCTGGG | TT | CAACA |
| 489 | 563 | 564 | 565 | MST4 | TAAGTATCCCTATTTCTTA | AATGTTGAGACACCGTTT | GTAGAGTCAACTAAAGAT |
| | | | | | AGTTACGAGGA | TGCTT | CAAAATGTGAAAG |
| 490 | 566 | 567 | 568 | BLAME | ATCACCTTCCCCCAAGATT | CCCTTTCCCACACCCACT | GGGATGGTGCAAGCTGAC |
| | | | | | ACCTGA | T | A |
| 491 | 569 | 570 | 571 | NME7 | TTGAAATCTCAGCTATGCA | TCCTGATGGCTATCCGAG | CCTCAACATTAACCCGAT |
| | | | | | GATGTTC | ATG | CCA |

TABLE 6
Statistical relevance of 20 genes differentially in non-responders (NC) as
compared to responding tumors. (CR—complete responder to therapy)

| SEQ ID NO: | SEQ ID NO: | | | | |
|---|---|---|---|---|---|
| (DNA | (Protein | | | Welch-Test | Wilcoxon |
| Sequence) | Sequence) | Gene_Symbol | T-Test p-value | p-value | p-value |
| 472 | 492 | PRG1 | 0.0002116 | 0.0002631 | 0.0003108 |
| 473 | 493 | GBP1 | 0.0020070 | 0.0023060 | 0.0029530 |
| 474 | 494 | ALEX2 | 0.0003502 | 0.0012570 | 0.0001554 |
| 475 | 495 | CD53 | 0.0019770 | 0.0039540 | 0.0018650 |
| 476 | 496 | VCAM1 | 0.0010630 | 0.0010690 | 0.0018650 |
| 477 | 497 | MAPT | 0.0005838 | 0.0007540 | 0.0001554 |
| 478 | 498 | EGR2 | 0.0008870 | 0.0009158 | 0.0006216 |
| 479 | 499 | TDO2 | 0.0084350 | 0.0105000 | 0.0018650 |
| 480 | 500 | ADAMDEC1 | 0.0018700 | 0.0021870 | 0.0029530 |
| 481 | 501 | TFEC | 0.0085550 | 0.0155500 | 0.0010880 |
| 482 | 502 | BTF3 | 0.0001140 | 0.0001471 | 0.0003108 |
| 483 | 503 | FLNB | 0.0006050 | 0.0007720 | 0.0018650 |
| 484 | 504 | TFRC | 0.0005408 | 0.0010110 | 0.0010880 |
| 485 | 505 | EIF4B | 0.0013130 | 0.0013330 | 0.0006216 |
| 486 | 506 | MAPK3 | 0.0001388 | 0.0003527 | 0.0006216 |
| 487 | 507 | LOC161291 | 0.0015790 | 0.0031610 | 0.0006216 |
| 488 | 508 | SLC1A1 | 0.0000179 | 0.0000389 | 0.0001554 |
| 489 | 509 | MST4 | 0.0000888 | 0.0000904 | 0.0001554 |
| 490 | 510 | BLAME | 0.0048620 | 0.0081110 | 0.0029530 |
| 491 | 511 | NME7 | 0.0020950 | 0.0021980 | 0.0006216 |

The application's sequence listing, which the Patent Office published only in electronic form, follows.

SEQUENCE LISTING (571 sequences)

SEQ ID NO: 1 - DNA, 1978 bp, Homo sapiens
gggagggtacttagggccggggctggcccaggctacggcggctgcagggctccggcaaccgctccggcaacgccaaccgctccgctgcgcgcaggctgggctgcaggctctcggctgcagcgctgggtggatctaggatccggcttccaacatgtggcagctctgggcctccctctgctgcctgctggtgttggccaatgcccggagcaggccctctttccatcccctgtcggatgagctggtcaactatgtcaacaaacggaataccacgtggcaggccgggcacaacttctacaacgtggacatgagctacttgaagaggctatgtggtaccttcctgggtgggcccaagccaccccagagagttatgtttaccgaggacctgaagctgcctgcaagcttcgatgcacgggaacaatggccacagtgtcccaccatcaaagagatcagagaccagggctcctgtggctcctgctgggccttcggggctgtggaagccatctctgaccggatctgcatccacaccaatgcgcacgtcagcgtggaggtgtcggcggaggacctgctcacatgctgtggcagcatgtgtggggacggctgtaatggtggctatcctgctgaagcttggaacttctggacaagaaaaggcctggtttctggtggcctctatgaatcccatgtagggtgcagaccgtactccatccctccctgtgagcaccacgtcaacggctcccggcccccatgcacgggggagggagatacccccaagtgtagcaagatctgtgagcctggctacagcccgacctacaaacaggacaagcactacggatacaattcctacagcgtctccaatagcgagaaggacatcatggccgagatctacaaaaacggccccgtggagggagctttctctgtgtattcggacttcctgctctacaagtcaggagtgtaccaacacgtcaccggagagatgatgggtggccatgccatccgcatcctgggctggggagtggagaatggcacaccctactggctggttgccaactcctggaacactgactggggtgacaatggcttctttaaaatactcagaggacaggatcactgtggaatcgaatcagaagtggtggctggaattccacgcaccgatcagtactgggaaaagatctaatctgccgtgggcctgtcgtgccagtcctgggggcgagatcggggtagaaatgcattttattctttaagttcacgtaagatacaagtttcagacagggtctgaaggactggattggccaaacatcagacctgtcttccaaggagaccaagtcctggctacatcccagcctgtggttacagtgcagacaggccatgtgagccaccgctgccagcacagagcgtccttccccctgtagactagtgccgtagggagtacctgctgccccagctgactgtggccccctccgtgatccatccatctccagggagcaagacagagacgcaggaatggaaagcggagttcctaacaggatgaaagttcccccatcagttcccccagtacctccaagcaagtagctttccacatttgtcacagaaatcagaggagagatggtgttgggagccctttggagaacgccagtctcccaggccccctgcatctatcgagtttgcaatgtcacaacctctctgatcttgtgctcagcatgattctttaatagaagttttattttttcgtgcactctgctaatcatgtgggtgagccagtggaacagcgggagacctgtgctagttttacagattgcctcctaatgacgcggctcaaaaggaaaccaagtggtcaggagttgtttctgacccactgatctctactaccacaaggaaaatagtttaggagaaaccagcttttactgtttttgaaaaattacagcttcaccctgtcaagttaacaaggaatgcctgtgccaataaaagttttctccaacttgaa

SEQ ID NO: 2 - DNA, 3285 bp, Homo sapiens
ctagaattcagcggccgctgaattctagacccggatgaagagtaacgccattaccgcccgagccgccgagagccttagccgacggaaactggacactggaccggcagcgccatgagactcctcccccgcttgctgctgcttctcttactcgtgttccctgccactgtcttgttccgaggcggccccagaggctcgttagcagtggcacaagatcttacagaggatgaagaaacagtagaagattccataattgaggatgaagatgatgaagccgaggtagaagaagatgaacccacagatttggtagaagataaagaggaagaagatgtgtctggtgaacctgaagcttcaccgagtgcagatacaactatactgtttgtaaaaggagaagattttccagcaaataacattgtgaagttcctggtaggctttaccaacaagggtacagaagattttattgttgaatccttagatgcctcattccgttatcctcaggaccaccagttttatatccagaatttcacagctcttcctctgaacactgtagtgccaccccagagacaggcaacttttgagtactctttcattcctgcagagcccatgggcggacgaccatttggtttggtcatcaatctgaactacaaagatttgaacggcaatgtattccaagatgcagtcttcaatcaaacagttacagttattgaaagagaggatgggttagatggagaaacaatctttatgtatatgttccttgctggtcttgggcttctggttattgttggccttcatcaactcctagaatctagaaagcgtaagagacccatacagaaagtagaaatgggtacatcaagtcagaatgatgttgacatgagttggattcctcaggaaacattgaatcaaatcaataaagcttcaccaagaaggttgcccaggaaacgggcacagaagagatcagtgggatctgatgagtaaatgttcctttgtgcaacaattcggtctttacttaacctgccctaatatttttcggcctgatgggaattagtgcagagaagccagtcaccatagaaggcaactcctacttgtgtgtggactgagcaatcagagtctgtggcgataatattgctgaaaatgcactgcattcatttttctaaagtaacaaatttggtttttttttaaaccattaaaatctatgtgtgtgcgtgtgtatgtatgtgagcagttggtcttaccagaatcattgttgaactacctgaaacaagtctttagaatactaaatataatgctgttgtctcttcctttttgacattttctgattttttcccccaaaactcagttaatatttacccactatgattattgatgtcctgccttgaacagttttaaagaaaacaatttttggaatagctcaaatttcaattgatggcacaaatcagcattttgttgttgttactgtattacaattagtattctaaaggcagaagcagaagtagctgctttttagcaatagaattgtttcagtattttgctgctgtttaatgcgcatcttcagaaaacttcccagtggcttcaaggaatttggggatctctctggcaacaaattgtgaaacatgaaatttctgctgactttaatatatgaaacctaatcctacccccttttttaacaaaaagaaactagtacatttgtgaaaattgtgttgtgttgtccattgttgctctagttctgacccagaggtagctctggagtgattttagacctactcactcagttgtgtgtaggtttttttgttttgttttgagagagaatttttctctccttaatagaagcatcctttttaaagagaagttgccttggtccacacactaagcagaaaaccaagttatcaggacagagatatttcccagttactcctaatcaatgaagaaagtgagttggatatttttaaagcagttaactaattttttcttacctaatcttttgggagttttgcttgttgatataacctttttagttaacctgaaagattccaaaaattgttcttaagtgcttgagactggaaccaaaattaaattgtacttcataaaatcctcttatagagttactcttgccctagattgtaaattaagtttggcattattgtcagactggatggagggtgaagtaaaatagtatgaacaattaagaggctctccccctcttgtctttaagccatattctcctacatgtattttataagaaaatgttaagtcaaattttagtggctctttaattcctgacctcttcattctccttttcagtataacctcccctatgctcatgcccacacagacaaaaaaacaaaacgaaatacacacagaaaaaagtctttccaaactgtttaagtatttaaacatctgagccaaagcagatagaagttattgtataattgttaatcactttgcaaataggggctatcaaattacctatattggcattgctggattataaactctatatctgtaatataaagtgtttgagtttttaattgggctgttatgatcagtaattgattttgagaaagctctatgagctctaagtaactgcatggttttttgtttaatgtaatataggagacccttcacattcccaaggaatatattccaaaacatttttgtgaatatctaagtttgtgaaactactagggcatgatacagtaaggtgtaattacagaatttacgaaatgtaaatggcctctacagagttttatggaatacctggtactaacgtaggcagctgcaaaaccacactgagttacagctgtcagccctcctcattcctaaataacttgccttacatatcagccctcccacttctgaagttcaaattagtgcctcggaaatgtagaatttattatttgtcattttttttttttagcatagattgagaacagttgaactcttaaatcctcagatgccaggggtctgctctagcatcagtaagtatttagcagaaactaactccgtaatgaatggaattcaattccacacatggtttgttcaagcacacttaataagtagcctattttttaaatgtctttttaaaatgtaaatatttggatgaagtttttctttgttttgatatattcatttgctacaccaactatgttttcagaattcatcttttgaacaacttggtttcagaatatgtaaaatgactttaaggatcttgtgtatcaaacctatccccggatgtgtgagaataatgtgttcataaagcatggatctcgtaaaaaaaaaaaaaaaaaaaaa

SEQ ID NO: 3 - DNA, 1545 bp, Homo sapiens
gaagacaccaccggaagcaaggaaggtgctgtgtaatcattaaggagcggaggcttttggagctgctaaaatgccggattacctcggtgccgatcagcggaagaccaaagaggatgagaaggacgacaagcccatccgagctctggatgagggggatattgccttgttgaaaacttatggtcagagcacttactctaggcagatcaagcaagttgaagatgacattcagcaacttctcaagaaaattaatgagctcactggtattaaagaatctgacactggcctggccccaccagcactctgggatttggctgcagataagcagacactccagagtgaacagcctttacaggttgccaggtgtacaaagataatcaatgctgattcggaggacccaaaatacattatcaacgtaaagcagtttgccaagtttgtggtggaccttagtgatcaggtggcacctactgacattgaagaagggatgagagtgggcgtggatagaaataaatatcaaattcacattccattgcctcctaagattgacccaacagttaccatgatgcaggtggaagagaaacctgatgtcacatacagtgatgttggtggctgtaaggaacagattgagaaactgcgagaagtagttgaaaccccattacttcatccagagaggtttgtgaaccttggcattgagcctcccaagggcgtgctgctctttggtccacccggtacaggcaagacactctgtgcgcgggcagttgctaatcggactgatgcgtgcttcattcgagttattggatctgagcttgtacagaaatacgtcggtgagggggctcgaatggttcgtgaactctttgaaatggccagaacaaaaaaagcctgccttatcttctttgatgaaattgatgctattggaggggctcgttttgatgatggtgctggaggtgacaatgaagtgcagagaacaatgttggaactgatcaatcagcttgatggttttgatcctcgaggcaatattaaagtgctgatggccactaacagacctgatactttggatccagcactgatgaggccagggagattggatagaaaaattgaatttagcttgcccgatctagagggtcggacccacatatttaagattcacgctcgttcaatgagtgttgaaagagatatcagatttgaactgttagcacgactgtgtccaaatagcactggtgctgagattagaagcgtctgcacagaggctggtatgtttgccatcagagcacggcgaaaaattgctaccgagaaggatttcttggaagctgtaaataaggtcattaagtcttatgccaaattcagtgctactcctcgttacatgacatacaactgaaccctgaaggctttcaagtgaaaactttaaattggaatcctaaccttatatagacttgttaataaccaattcataaacaaataaatggcttcaaaattgtatgcttttttccatatctcttcttgtaatataataaaaggtgatttctaatgttaaaaaaaaaaaaaaaaaaa

SEQ ID NO: 4 - DNA, 1976 bp, Homo sapiens
gccacacggtctttgagctgagtcgaggtggaccctttgaacgcagtcgccctacagccgctgattccccccgcatcgcctcccgtggaagcccaggcccgcttcgcagctttctccctttgtctcataaccatgtccaccaacgagaatgctaatacaccagctgcccgtcttcacagattcaagaacaagggaaaagacagtacagaaatgaggcgtcgcagaatagaggtcaatgtggagctgaggaaagctaagaaggatgaccagatgctgaagaggagaaatgtaagctcatttcctgatgatgctacttctccgctgcaggaaaaccgcaacaaccagggcactgtaaattggtctgttgatgacattgtcaaaggcataaatagcagcaatgtggaaaatcagctccaagctactcaagctgccaggaaactactttccagagaaaaacagccccccatagacaacataatccgggctggtttgattccgaaatttgtgtccttcttgggcagaactgattgtagtcccattcagtttgaatctgcttgggcactcactaacattgcttctgggacatcagaacaaaccaaggctgtggtagatggaggtgccatcccagcattcatttctctgttggcatctccccatgctcacatcagtgaacaagctgtctgggctctaggaaacattgcaggtgatggctcagtgttccgagacttggttattaagtacggtgcagttgacccactgttggctctccttgcagttcctgatatgtcatctttagcatgtggctacttacgtaatcttacctggacactttctaatctttgccgcaacaagaatcctgcacccccgatagatgctgttgagcagattcttcctaccttagttcggctcctgcatcatgatgatccagaagtgttagcagatacctgctgggctatttcctaccttactgatggtccaaatgaacgaattggcatggtggtgaaaacaggagttgtgccccaacttgtgaagcttctaggagcttctgaattgccaattgtgactcctgccctaagagccatagggaatattgtcactggtacagatgaacagactcaggttgtgattgatgcaggagcactcgccgtctttcccagcctgctcaccaaccccaaaactaacattcagaaggaagctacgtggacaatgtcaaacatcacagccggccgccaggaccagatacagcaagttgtgaatcatggattagtcccattccttgtcagtgttctctctaaggcagattttaagacacaaaaggaagctgtgtgggccgtgaccaactataccagtggtggaacagttgaacagattgtgtaccttgttcactgtggcataatagaaccgttgatgaacctcttaactgcaaaagataccaagattattctggttatcctggatgccatttcaaatatctttcaggctgctgagaaactaggtgaaactgagaaacttagtataatgattgaagaatgtggaggcttagacaaaattgaagctctacaaaaccatgaaaatgagtctgtgtataaggcttcgttaagcttaattgagaagtatttctctgtagaggaagaggaagatcaaaacgttgtaccagaaactacctctgaaggctacactttccaagttcaggatggggctcctgggacctttaacttttagatcatgtagctgagacataaatttgttgtgtactacgtttggtattttgtcttattgtttctctactaagaactctttcttaaatgtggtttgttactgtagcactttttacactgaaactatacttgaacagttccaactgtacatacatactgtatgaagcttgtcctctgactaggtttctaatttctatgtggaatttcctatcttgcagcatcctgtaaataaacattcaagtccacccttaaaaaaaa

SEQ ID NO: 5 - DNA, 3579 bp, Homo sapiens
tcaggctcgctgtcgcgccattttgccggggtttgaatgtgaggcggagcggcggcaggagcgggtagtgccagctacggtccgcggctggggttccctcctccgtttctgtatccccacgagatcctatagcaatggaactcagcgatgcaaatctgcaaacactaacagaatatttaaagaaaacacttgatcctgatcctgccatccgacgtccagctgagaaatttcttgaatctgttgaaggaaatcagaattatccactgttgcttttgacattactggagaagtcccaggataatgttatcaaagtatgtgcttcagtaacattcaaaaactatattaaaaggaactggagaattgttgaagatgaaccaaacaaaatttgtgaagccgatcgagtggccattaaagccaacatagtgcacttgatgcttagcagcccagagcaaattcagaagcagttaagtgatgcaattagcattattggcagagaagattttccacagaaatggcctgacttgctgacagaaatggtgaatcgctttcagagtggagatttccatgttattaatggagtcctccgtacagcacattcattatttaaaagataccgtcatgaatttaagtcaaacgagttatggactgaaattaagcttgttctggatgcctttgctttgcctttgactaatctttttaaggccactattgaactctgcagtacccatgcaaatgatgcctctgccctgaggattctgttttcttccctgatcctgatctcaaaattgttctatagtttaaactttcaggatctccctgaattttttgaagataatatggaaacttggatgaataattttcatactctcttaacattggataataagcttttacaaactgatgatgaagaggaagccggcttattggagctcttaaaatcccagatttgtgataatgccgcactctatgcacaaaagtacgatgaagaattccagcgatacctgcctcgttttgttacagccatctggaatttactagttacaacgggtcaagaggttaaatatgatttgttggtaagtaatgcaattcaatttctggcttcagtttgtgagagacctcattataagaatctatttgaggaccagaacacgctgacaagtatctgtgaaaaggttattgtgcctaacatggaatttagagctgctgatgaagaagcatttgaagataattctgaggagtacataaggagagatttggaaggatctgatattgatactagacgcagggctgcttgtgatctggtacgaggattatgcaagttttttgagggacctgtgacaggaatcttctctggttatgttaattccatgctgcaggaatacgcaaaaaatccatctgtcaactggaaacacaaagatgcagccatctacctagtgacatctttggcatcaaaagcccaaacacagaagcatggaattacacaagcaaatgaacttgtaaacctaactgagttctttgtgaatcacatcctccctgatttaaaatcagctaatgtgaatgaatttcctgtccttaaagctgacggtatcaaatatattatgatttttagaaatcaagtgccaaaagaacatcttttagtctcgattcctctcttgattaatcatcttcaagctgaaagtattgttgttcatacttacgcagctcatgctcttgaacggctctttactatgcgagggcctaacaatgccactctctttacagctgcagaaatcgcaccgtttgttgagattctgctaacaaaccttttcaaagctctcacacttcctggctcttcagaaaatgaatatattatgaaagctatcatgagaagtttttctctcctacaagaagccataatcccctacatccctactctcatcactcagcttacacagaagctattagctgttagtaagaacccaagcaaacctcactttaatcactacatgtttgaagcaatatgtttatccataagaataacttgcaaagctaaccctgctgctgttgtaaattttgaggaggctttgtttttggtgtttactgaaatcttacaaaatgatgtgcaagaatttattccatacgtctttcaagtgatgtctttgcttctggaaacacacaaaaatgacatcccgtcttcctatatggccttatttcctcatctccttcagccagtgctttgggaaagaacaggaaatattcctgctctagtgaggcttcttcaagcattcttagaacgcggttcaaacacaatagcaagtgctgcagctgacaaaattcctgggttactaggtgtctttcagaagctgattgcatccaaagcaaatgaccaccaaggtttttatcttctaaacagtataatagagcacatgcctcctgaatcagttgaccaatataggaaacaaatcttcattctgctattccagagacttcagaattccaaaacaaccaagtttatcaagagttttttagtctttattaatttgtattgcataaaatatggggcactagcactacaagaaatatttgatggtatacaaccaaaaatgtttggaatggttttggaaaaaattattattcctgaaattcagaaggtatctggaaatgtagagaaaaagatctgtgcggttggcataaccaaattactaacagaatgtcccccaatgatggacactgagtataccaaactgtggactccattattacagtctttgattggtctttttgagttacccgaagatgataccattcctgatgaggaacattttattgacatagaagatacaccaggatatcagactgccttctcacagttggcatttgctgggaaaaaagagcatgatcctgtaggtcaaatggtgaataaccccaaaattcacctggcacagtcacttcacaagttgtctaccgcctgtccaggaagggttccatcaatggtgagcaccagcctgaatgcagaagcgctccagtatctccaagggtaccttcaggcagccagtgtgacactgctttaaactgcatttttctaatgggctaaacccagatggtttcctaggaaatcacaggcttctgagcacagctgcattaaaacaaaggaagttctccttttgaacttgtcacgaattccatcttgtaaaggatattaaatgttgctttaacctgaaccttgagcaaattagttggtttgtgtgatcatacagttatgtgggtggcttctagtttgcaacttcaagggacaagtattaatagttcagtgtatggcgttggtttgtgttgagcgtttgcacggtttggataatcttaaattttgacggacactgtggagactttctgttactaaatccttttgttttgaagctgttgctatttgtatttctcttgtcctttatattttttgtctgtttatttacgcttttattggaaatgtgaataagtaaagaattacttgtgttacttgccaagcagtgcacatttcatagtttcaaatctgtaatcagcaataaaaatcctaaaatatgtacctaaaaaaaaaaaaaaaaaaaa

SEQ ID NO: 6 - DNA, 1396 bp, Homo sapiens
gcgtaattaaaaggcggcggaagaaggtgggagggtcatgacgcagcgagtttcagtcgtgacttttctgggggcatcgcggcgtccccttttttttgcctttaaagtaaaacgtcgccccgacgcaccccccgcgtatttcggggggcggaggcggcgggccacggcgcgaagaggggcggtgctgacgccggccggtcacgtgggcgtgttgtgggggggaggggcgccgccgcgcggtcggttccgggcggttgggagcgcgcgagctagcgagcgagaggcagccgcgcccgccgccgcccctgctctgtatgccgctctctcccggcgcggccgccgccgatcacagcagcaggagccaccgccgccgcggttgatgtggttgggccggggctgaggaggccgccaagatgccgcagtccaagtcccggaagatcgcgatcctgggctaccggtctgtggggaaatcctcattgacgattcaatttgttgaaggccaatttgtggactcctacgatccaaccatagaaaacacttttacaaagttgatcacagtaaatggacaagaatatcatcttcaacttgtagacacagccgggcaagatgaatattctatctttcctcagacatactccatagatattaatggctatattcttgtgtattctgttacatcaatcaaaagttttgaagtgattaaagttatccatggcaaattgttggatatggtggggaaagtacaaatacctattatgttggttgggaataagaaagacctgcatatggaaagggtgatcagttatgaagaagggaaagctttggcagaatcttggaatgcagcttttttggaatcttctgctaaagaaaatcagactgctgtggatgtttttcgaaggataattttggaggcagaaaaaatggacggggcagcttcacaaggcaagtcttcatgctcggtgatgtgattctgctgcaaagcctgaggacactgggaatatattctacctgaagaagcaaactgcccgttctccttgaagataaactatgcttcttttttcttctgttaacctgaaagatatcatttgggtcagagctcccctcccttcagattatgttaactctgagtctgtccaaatgagttcacttccattttcaaattttaagcaatcatattttcaatttatatattgtatttcttaatattatgaccaagaattttatcggcattaatttttcagtgtagtttgttgtttaaaataatgtaatcatcaaaatgatgcatattgttacactactattaactaggcttcagtatatcagtgtttatttcattgtgttaaatgtatacttgtaaataaaatagctgcaaacctcaaaaaaaaaaaaaaaaaaa

SEQ ID NO: 7 - DNA, 2465 bp, Homo sapiens
gagcagcgcggcctgacgggaccaaggcggcgggagtctgcggtcgttccctcggctgtggaccgggcggcacgcacgcggtgcagggtaacatggcggatgcggaagtaattattttgccaaagaaacataagaagaaaaaggagcggaagtcattgccagaagaagatgtagccgaaatacaacacgctgaagaatttcttatcaaacctgaatccaaagttgctaagttggacacgtctcagtggccccttttgctaaagaattttgataagctgaatgtaaggacaacacactatacacctcttgcatgtggttcaaatcctctgaagagagagattggggactatatcaggacaggtttcattaatcttgacaagccctctaacccctcttcccatgaggtggtagcctggattcgacggatacttcgggtggagaagacagggcacagtggtactctggatcccaaggtgactggttgtttaatcgtgtgcatagaacgagccactcgcttggtgaagtcacaacagagtgcaggcaaagagtatgtggggattgtccggctgcacaatgctattgaaggggggacccagctttctagggccctagaaactctgacaggtgccttattccagcgacccccacttattgctgcagtaaagaggcagctccgagtgaggaccatctacgagagcaaaatgattgaatacgatcctgaaagaagattaggaatcttttgggtgagttgtgaggctggcacctacattcggacattatgtgtgcaccttggtttgttattgggagttggtggtcagatgcaggagcttcggagggttcgttctggagtcatgagtgaaaaggaccacatggtgacaatgcatgatgtgcttgatgctcagtggctgtatgataaccacaaggatgagagttacctgcggcgagttgtttaccctttggaaaagctgttgacatctcataaacggctggttatgaaagacagtgcagtaaatgccatctgctatggggccaagattatgcttccaggtgttcttcgatatgaggacggcattgaggtcaatcaggagattgtggttatcaccaccaaaggagaagcaatctgcatggctattgcattaatgaccacagcggtcatctctacctgcgaccatggtatagtagccaagatcaagagagtgatcatggagagagacacttaccctcggaagtggggtttaggtccaaaggcaagtcagaagaagctgatgatcaagcagggccttctggacaagcatgggaagcccacagacagcacacctgccacctggaagcaggagtatgttgactacagtgagtctgccaaaaaagaggtggttgctgaagtggtaaaagccccgcaggtagttgccgaagcagcaaaaactgcgaagcggaagcgagagagtgagagtgaaagtgacgagactcctccagcagctcctcagttgatcaagaaggaaaagaagaagagtaagaaggacaagaaggccaaagctggtctggagagcggggccgagcctggagatggggacagtgataccaccaagaagaagaagaagaagaagaaagcaaaagaggtagaattggtttctgagtagtgaaggccacttgaagctggaggagaaactaaagccttattgagaaaacatgttatagatccttttgttgctgagagagtggaacataggtcctagacagggtgaagagttctggcacattttagctgctactttgagacctcggtgatgttacctggtgtggtcatcccatcttgtcctgttttaaggatatgggtggtgaaagatgaaagaggcagagtttatcccaatgacttctctgtttgagttgggaagcctcaccttcagacccagtaactgtccgcagctgtctgctagtggttgtcttaacatcgtagtcctagtttgcattttttaaatcccctctgtttaaaaggtttgtaaaacaaaaacaaaaaactaagtctgctcagtgaaatgctgtagaaccctaaataagtggtagaagagtgtcactgaattttgtctctgaattcagtataactgagttttgtccatgctggtgtctgggttataggcctgatgggcctggtagttttccatcttgttctggcctagaggtcagtcctttgcacttcctcaaagcttgtgtacagtgctcacctaaatccatctgactacttgttcctgtgccctcttgttttaggcctcgtttacttttaaaaaatgaaattgttcattgctgggagaagaatgttgtaatttttacttattaaagtcaacttgttaagttttttatgtattcctgttgggttttcttgttgatctcatgctagcagagcaaaaattgtaaaatattttgattaaaaatctagggacctttatgtcctatttggaattcgatatcaa

SEQ ID NO: 8 - DNA, 2160 bp, Homo sapiens
agccccctgcccctcgccgccccccgccgcctgcctgggccgggccgaggatgcggcgcagcgcctcggcggccaggcttgctcccctccggcacgcctgctaacttcccccgctacgtccccgttcgcccgccgggccgccccgtctccccgcggcctccgggtccgggtcctccaggacggccaggccgtgccgccgtgtgccctccgccgctcgcccgcgcgccgcgcgctccccgcctgcgcccagcgccccgcgcccgcgccccagtcctcgggcggtccatgctgcccctctgcctcgtggccgccctgctgctggccgccgggcccgggccgagcctgggcgacgaagccatccactgcccgccctgctccgaggagaagctggcgcgctgccgcccccccgtgggctgcgaggagctggtgcgagaggcgggctgcggctgttgcgccacttgcgccctgggcttggggatgccctgcggggtgtacaccccccgttgcggctcgggcctgcgctgctacccgccccgaggggtggagaagcccctgcacacactgatgcacgggcaaggcgtgtgcatggagctggcggagatcgaggccatccaggaaagcctgcagccctctgacaaggacgagggtgaccaccccaacaacagcttcagcccctgtagcgcccatgaccgcaggtgcctgcagaagcacttcgccaaaattcgagaccggagcaccagtgggggcaagatgaaggtcaatggggcgccccgggaggatgcccggcctgtgccccagggctcctgccagagcgagctgcaccgggcgctggagcggctggccgcttcacagagccgcacccacgaggacctctacttcatccccatccccaactgcgaccgcaacggcaacttccaccccaagcagtgtcacccagctctggatgggcagcgtggcaagtgctggtgtgtggaccggaagacgggggtgaagcttccggggggcctggagccaaagggggagctggactgccaccagctggctgacagctttcgagagtgaggcctgccagcaggccagggactcagcgtcccctgctactcctgtgctctggaggctgcagagctgacccagagtggagtctgagtctgagtcctgtctctgcctgcggcccagaagtttccctcaaatgcgcgtgtgcacgtgtgcgtgtgcgtgcgtgtgtgtgtgtttgtgagcatgggtgtgcccttggggtaagccagagcctggggtgttctctttggtgttacacagcccaagaggactgagactggcacttagcccaagaggtctgagccctggtgtgtttccagatcgatcctggattcactcactcactcattccttcactcatccagccacctaaaaacatttactgaccatgtactacgtgccagctctagttttcagccttgggaggttttattctgacttcctctgattttggcatgtggagacactcctataaggagagttcaagcctgtgggagtagaaaaatctcattcccagagtcagaggagaagagacatgtaccttgaccatcgtccttcctctcaagctagcccagagggtgggagcctaaggaagcgtggggtagcagatggagtaatggtcacgaggtccagacccactcccaaagctcagacttgccaggctccctttctcttcttccccaggtccttcctttaggtctggttgttgcaccatctgcttggttggctggcagctgagagccctgctgtgggagagcgaagggggtcaaaggaagacttgaagcacagagggctagggaggtggggtacatttctctgagcagtcagggtgggaagaaagaatgcaagagtggactgaatgtgcctaatggagaagacccacgtgctaggggatgaggggcttcctgggtcctgttcccctaccccatttgtggtcacagccatgaagtcaccgggatgaacctatccttccagtggctcgctccctgtagctctgcctccctctccatatctccttcccctacacctccctccccacacctccctactcccctgggcatcttctggcttgactggatggaaggagacttaggaacctaccagttggccatgatgtcttttctt

SEQ ID NO: 9 - DNA, 9725 bp, Homo sapiens
cgcgcgggctacctcagttctcgggcgtacggcgcggcctgtcctactgccgccggcgccgcggccgtcatggggttcctgaaactgattgagattgagaactttaagtcgtacaagggtcgacagattatcggaccatttcagaggttcaccgccatcattggacccaatggctctggtaagtcaaatctcatggatgccatcagctttgtgctaggtgaaaaaaccagcaacctgcgggtaaagaccctgcgggacctgatccatggagctcctgtgggcaagccagctgccaaccgggcctttgtcagcatggtctactctgaggagggtgctgaggaccgtacctttgcccgtgtcattgtaggaggttcttctgagtacaagatcaacaacaaagtggtccaactacatgagtacagtgaggaattagagaagttgggcattctcatcaaagctcgtaacttcctcgttttccagggtgctgtggaatctattgccatgaagaaccccaaagagaggacagctctatttgaagagattagtcgttctggggagctggcgcaggagtatgacaagcgaaagaaggaaatggtgaaggctgaagaggacacacagtttaattaccatcgcaagaaaaatattgcggctgaacgcaaggaagcaaagcaggagaaagaagaggctgaccggtaccagcgcctgaaggatgaggtagtacgggctcaggtacagctgcagctctttaagctttaccataatgaagtggaaattgagaagctcaacaaggaactggcctcaaagaacaaggagatcgagaaggacaagaagcgtatggacaaggtggaggatgaactgaaggagaagaagaaggagctgggcaaaatgatgcgggagcagcagcagattgagaaggagatcaaggagaaggactcagaattgaaccagaagcggcctcagtacatcaaagccaaggagaacacctcccacaaaatcaagaagctggaagcagccaagaagtctctgcagaatgctcagaagcactacaagaagcgtaaaggtgacatggatgagctggagaaggagatgctgtcagtggagaaggctcggcaggagtttgaagaacggatggaagaagagagtcagagtcagggcagagatttgacgttggaggagaatcaggtgaagaaataccaccggttgaaagaagaagccagcaagagagcagctaccctggcccaggagctggagaaattcaatcgagaccagaaagctgaccaggaccgtctggatctggaagaacggaagaaagtagagacagaggccaagatcaagcaaaagctgcgggaaattgaagagaatcagaagcggattgagaaactggaggaatacatcaccactagcaagcagtccctagaagagcagaagaagctagagggggagctgacagaggaggtggagatggccaagcggcgtattgatgaaatcaataaggagctgaaccaggtgatggagcagctaggggatgcccgcatcgaccgccaggagagcagccgccagcagcgaaaggcagagataatggaaagcatcaagcgcctttaccctggctctgtgtacggccgcctcattgacctatgccagcccacacaaaagaagtatcagattgctgtaaccaaggttttgggcaagaacatggatgccattattgtggactcggagaagacaggccgggactgtattcagtatatcaaggagcagcgtggggagcctgagaccttcttgcctcttgactacctggaggtgaagcctacagatgagaaactccgggagctgaagggggccaagctagtgattgatgtgattcgctatgagccacctcatatcaaaaaggccctgcagtatgcttgtggcaatgcccttgtctgtgacaacgtggaagatgcccgccgcattgcctttggaggccaccagcgccacaagacagtggcactggatggaaccctattccagaagtcaggagtgatctctggtggggccagtgacctgaaggccaaggcacggcgctgggatgagaaagcagtagacaagttgaaagagaagaaggagcgcttgacagaggagctgaaagagcagatgaaggcaaaacggaaagaggcagagctgcgtcaggtgcagtctcaggcccatggactgcagatgcggctcaagtactcccagagtgacctagaacagaccaagacacgacatctagccctgaatctgcaggaaaaatccaagctggagagtgagctagccaactttgggcctcgcattaatgatatcaagaggatcattcagagccgagagagggaaatgaaagacttgaaggagaagatgaaccaggtagaggatgaggtgtttgaagagttttgtcgggagattggtgtgcgcaacatccgggagtttgaggaagaaaaggtgaaacggcagaatgaaatcgccaagaagcgtttggagtttgagaatcagaagactcgcttgggcattcagttggattttgaaaagaaccaactgaaggaggaccaagataaagtacacatgtgggagcagacagtgaaaaaagatgaaaatgagatagaaaagctcaaaaaggaggaacaaagacacatgaagatcatagatgagaccatggctcagctacaagacctgaagaatcagcatctggccaagaagtcggaagtgaatgacaagaatcatgagatggaggagattcgtaagaaactcgggggcgccaacaaggaaatgacccatttacagaaggaggtgacagccattgagaccaagcttgaacagaagcgcagtgaccgtcacaacttgctacaggcctgtaagatgcaggacattaagttgccactgtcaaaaggcaccatggatgatattagtcaggaagagggtagctcccagggggaggactcagtgagtggttcacagagaatttccagtatctatgcacgagaggccctcattgagattgactacggtgatctgtgtgaggatctgaaggatgcccaggctgaggaagagatcaagcaagagatgaacacactgcagcagaagctgaatgagcagcagagtgtgcttcagcgtattgccgcccccaacatgaaggccatggaaaagctggaaagtgtccgagacaagttccaggagacctcagatgagtttgaagcagcccgaaagcgagcaaagaaggccaagcaggcattcgaacagatcaagaaggagcgctttgaccgcttcaatgcttgttttgaatctgtggctaccaacattgatgagatctataaggccctgtcccgcaatagcagtgcccaggcattcctgggccctgagaaccctgaagagccctacttggatggcatcaactacaactgtgtggctcctgggaaacgcttccggcctatggacaacttgtcaggcggggagaagacagtggcagctctggccctgctctttgccatccacagctacaagccagcccccttcttcgtcctggatgagattgatgctgccttggataacaccaacattggcaaggtggcaaattacatcaaggagcagtcgacttgcaacttccaggccatcgtcatctctctcaaggaggagttctacaccaaggccgagagcctcattggagtctatcctgagcaaggggactgtgtgatcagcaaagtcctgaccttcgacctcaccaagtacccagatgccaaccccaaccccaatgagcagtagcagtatttttgccctcccgccctgtctggatccctaagctgtccctctcccaatctctggatatttgactcccaaccttccccctacctcctggccctttttggtgtagtcatgggatttaggcactgctaatcaagcatgaagaggaacagaggtgatgttaggtctggagcaaaaattcctgaacgacagggagtattctggcctctgaaaggaggtgctgagctgaacagggccatctgttcatcacacacacccccttcctccccctcatcacccataatcgtgggccccttgggcctcttgcccactgtgtgtgtgggtatgtatgtgtgtatgtatgtatccgcatgtgtgcatgtgagtatgtttgcaaaataataaaggatattggagacctgttttagaaggagcctaggctgaatttgattccaagagagcttaggatgacagcacccctgagctgggcaaaggtactcaggacctcataggagtcttaggcagttacctgaaactgccttcattcactcatttgtgtattcattcatttatgtattcatcagacacataccgaacaccctctatttgtcaggctctgtgcttggaatacagagttgaatcagacatgatctctaccctcctagtaaggagatacagtgggttcatgaatgactatagttagctgaatgtcatatgtactttgaatttgagaagtgggtgatcccctctaggcttcctggaggtcacatttaagctagaccttgacaaattggtaggatttggtcaggcactaggagtggagcatgagctctggggacagacagttatgggttctggtcccactttttatcacttactagttgtttgaccttgggcaagtcatttgaccttctgtgcctcagtttcctcatctgtaaaatggggctaacaatattacctacctcataggatttaatgatgtcaagctcctcactggaggccttatcccttcgtggagcccactaggtgccgacccctcagaatataaccctcatgcctggacccctgagagcttctgatcccagctattagggacagaagaagcctccaaatctggaaggtgctgaatgccctgctgactgggaaagtttcagggcactgatggggtctacctggtaagcggagggcctgaggaaacctgtagcttcaatcatgtctggtaaccgggtgcctgagccccaatctgggttgtgaggaaataggggagaggtatcctgggccacatcccagcctaacacctgtgaggttcattttaggaactaacctcattagctataaggatcatgcagaggcagcaaagccgggtgcgatgagctcagcctttactcattcacatacaccatcacactttaattccaatctgtatattgctttttaaaagttaagtccattctaattacccaaatatgcatgaattcattctccttttgagaagttagattgttaaagatagtctcattcagctaccaaccactccttgatccttcccttcttagtggctgttgtttgttgtacttccgtttagactttgttttaatgcttgtacgtacatatgtgaactcattggaaatattgtgtgtttaatgcaaatgatatattgaattgtttagcaatttgttttctttgcttaacgatgtttttgagatctgtgcatgttacttaatgtagctcaatccatcttctgtaattgctgtatagattgtcatcatatgattaccacattttacttacgcatttcttttgtgatggacattaagactgtttttaggttttgctattacaaaatactacacaggagcatcactatgcctgtgtgaaagtatatgtatgaaagtttacctagggttgattcctagaagtggaattgcaaagtcataggatatttatatattggtttttaataatacttccaaattgccctcctgtactatttactcagtatttttcttgaggttgatctgaggtctaacattgttatcctatatcattttcatcccaagtagtgatatctgtgaaatcacaggtttgatgtgtgctaattatgtattcttctaatacatattaaaagacataactatcaaaacaaaataaatttgtctgttttcaaccaaagaagtcacgtaccactggtggtactgtgtgccataatttggcaaatgctggcctttatggacgagcacaattcgggggtcagacctggttcaaattctagctgtagaaacttgtgcaagttacttcacctctgagcctaagtttccacatctgtaaaaggagataataaacacctaccttgcagtagtgaagcaaagagaaaattaaatatatatgaagcaatttggctggcatctagatcattcacagccctttaaaggtcacctttgctgttctccccactttacagataaggaaactgaggcccaaaaaggtttgaacccaggtcttccaagtcattcaagtgctttctccactgtacaggtggttatcaaccttggctgcgcatcagaatcgtttgtaaagctttttctttttcctttttaaaaagtaaagcaatatatacacaggtaaaaaaataaaatagtacagaagggcttataatgagaagcagcagttccctgcttgcacccccacatccaaaggatgtggagctctttaaaaataaattgctctggtcccacctctggaaatctgattcagccagcatggataataacccagataactaacccctacctcacaggataaaaaggattacatgagatgccttaggctaaggccctggcacacaggaacacatgtgctacaaaggagctttggggacttaagtcctgaggatccaggaggtgaggtgacttgtccaagattccactggtttagtggcagagcctagacttccactcggatctatttagtgcttgccccctgctctctcctgtcgtgccccaccacctcctggcatcacagggcaaccgttgtcaaggctatgctcacgggaggctgggcaccacagtgtttccaagagcaagctggatccgagtagattccctagggcttgttggaggaactagtttgactcccttatactgtggacgcagtagccttgctgtagggagttgaagagtactccacaacagtatcttaagtttaactgggcacttccctctggaaatcacagtgttgtgcaccaggaacacaaagatgagtcaaatctttatcctgcctttgaggagctcactgtttagttggggaaaccatttgtaaaacagccattaaccatacagtgtgatcaacactgacaggagcacaggaaaaacatctagcttatgtgaagattcagagaaggcatcctgtagtctaggtggtgatacctgaactgagtcttgagggacgggtaggaattagccagttgaggaagtagaaggaatttccagatattggaaacagtatgcatgaagacatgaaggcaagaaacagcaaaacaaatactgaagcatgaagattcctggggtggggggaaagcagcaagaaaaggtagagaggaaccagattggaagagggtcgtaaatgcatggctacagaattcagatttgttttgtaggacagtgtggttcccaaactggctgtataccacaaacaggtacggcattctgggccccggcccctaaaacattcattaagtctggggtgaagatttggaatcttgaatgcttataaaggttaccacatgactagggtacagccagatttggaaaccatagcttgaaggcagtgagggagccatgaaatggtttttaatagggggactccagatcagatgtgaacttaacctgtttctggctggctagccaaccagcatggaaaacagattaggttagatgttcatgctgtatgtgcccgtgcctgtagcttccctgttaatcagcttcttacactactatatttgcttattttgtctctgaataagctttaggcaccacaagggtgggcctggggatattttgcttaccagtatagcccctgcaaaaaagcacagtgcctgacacaaaacaggcacccagtaaagtttttgaatgaatgaatgcatgagtgaatccatttgtgagagagcgaatggagatgacaagattagctaggagactggaaaaagaccaggaggcctgcactagggcaaaggccagtaggaatagattggaggtgttaaggtgtgaactgttaaggtaagatgataacttaatgactgattattggatgtggagggtgactgagaggatagaatgagtacccatgaatagccatgattcctaccctgtcccagtcatctctttccttatccatctctgaaacaatctgcttacatcctcctcagcaactggaattcctcaagttagttagacattctgtgtgctgtgtggtctctcactgcccccccactccccacccctccacaagccattgattcattcatccagttcaataaatcttggctaagcacctccagtgtgcagtaaggctcttccaagccaggactctgactccctctttcctacctcaagagatgtttttgagggctttcccaggtaagagtcacatctcttatacaataacttatagtgagatacccagaatgtcagacttgtaagggaagactgcccaaaccccttctgaggtcctcagaggggaattaacttcctaaggtccgactgctaggaagtgttggagccagaaatggaacctaggtttcctttctatgtcatctctggagtcttgatcttgatctatcccattgtagatcaggacaggcagaggtggtcagggagaaggtgggacttaggttgaaccttgaaggtcaatgtattggacaggtcaaacaagatggttgccaattacactgcccccttctggaaacccttagcaaacctgccatgcttgcagtcccttctaaggggtttccttagcataagttgccatgctctgtaccatgtgacctcacaatcctggccacagatagctagatgtggatagtgtctggttcaagggcaaccaatctctaggctggccagtggcctgttagctggactggcataaggacttcaccttacaggggtggcatgtatcaaatggcaaatgtatgaaacaaccagatctttcagggaggcagaatgtgagctattcagaagaagtgaacgttaattagaatttaatgaggcattagtggtggtggatgaggggtggccagaaactaaacagcaaaagcaaagagaaagctgcagaaaccataagtaagcagaggtcatgagacatttgtataatgagatcacggagccacagggtggcagaagccatgaagcagcaaggcaacaatgggctagaagccatgaagcaataggagccacgaggaacagaaaccgtgagacaaaactgactatgagatccacaaagcagcagaaggcttgaatagataagatcatgagacagtagaagcgatgagactgcaagaaccacaaggtagccagaaccatgtggcaacatggcaacaggaatggaagaggcagcaggagctacaatgcagaaaagccatggattaataggaactgaagcgccgggagccatgaagctgcaggacccatgaggcagaaaaagccatgggctagcatcgaggggggcagaaagaagttagtcagtagcagtaggaggagtataaatacagccagaaaggagttgagtcaccaatttgggaagcactagagaagggagcaacagatgcctgcagctgagggggtgacaagataagccaggctctagagctgctttggatcatgaaccattttcaagtttctgttcttccatgaggctgcctgtgtagctgttcttgtcttccttatttccctgtgaatgctttaataaatccccatcactaa

SEQ ID NO: 10 - DNA, 1853 bp, Homo sapiens
gatccctgagcgtgtggcagcagtgcggtcgtggtccctccctatgcagcctggtttctagcgtgacacgcccttgacttgaggaccatgaaccgcagccgccaggtgacgtgcgtggcctgggtccgctgcggcgtggccaaagagacaccagacaaggtagagctgagtaaagaagaagtaaaacgcctcattgctgaggcaaaggagaaattgcaagaagaaggtggtggcagtgatgaagaggagacaggcagtccttcagaagatggcatgcagagtgcacgcacccaggcacgcccaagagagcccctggaggatggtgacccagaggatgacaggacgcttgatgatgatgagctggctgagtacgacttagataaatatgatgaggaaggtgacccagatgctgagactcttggtgaatctctcttgggtcttacggtctacgggagtaatgatcaagatccttacgttactctgaaagatacagaacaatatgaacgtgaagatttcttgattaagcccagtgataatcttatagtttgtggccgagctgaacaggaccagtgcaatttagaggtgcatgtttataatcaagaagaagactctttttatgtacaccatgatatactcttgtctgcatatcctctgagtgtggaatggctgaattttgatcctagcccagatgattctactggaaattacattgctgtaggaaacatgacccctgttattgaagtgtgggaccttgatatagtggactctttagagccagtcttcacactcggaagtaaactttcaaaaaagaagaaaaagaaaggaaagaagagttcctcagcagaagggcataccgatgctgtccttgacctttcatggaataagctaatcagaaatgttttagcaagtgcatcagctgacaacactgtaattctgtgggatatgtccttggggaaaccagcagctagcctcgctgtacacacagacaaggtccaaacactgcagtttcatccatttgaagcacagactctgatttctggctcatatgataagtcagtggctttgtatgactgccgaagtccagatgaaagccatcgaatgtggcgattcagtgggcagatagagagagtgacttggaatcacttttcaccttgtcatttcttggccagtacagatgacggctttgtatataatttggatgcacgttcagataagccaatttttacacttaatgcacacaatgatgaaatctctggtcttgatcttagcagtcaaatcaagggctgtctcgtgactgcttcagctgacaaatacgtgaagatctgggacatcttaggagataggccaagtctagttcattctagggacatgaaaatgggagttctcttctgttcttcatgttgccctgatttgccatttatttatgcctttggaggtcaaaaagaagggcttcgggtctgggatataagcacagtctcttcagtaaatgaagcatttggaagacgagagaggcttgttcttgggagtgcaagaaattcatctattagtggcccttttggcagcaggagctcagatacacccatggagtcttaatgaagatcatctaatttcctgcttaccttaactgggaattttaaaaagttggcctaaaaatgttccatgcgtggcagcaaccatgcagagtgactgaaacacaattcatttctgactgacattcctttctgcaactgcggtggcaccacaaatatccggtctttgtgcttgctcttcagatggatggtttgtaaggctcttgttgcatttcttaaaaaagagtaataaaaaggatttttaaaaagtaattccttaaacat

SEQ ID NO: 11 - DNA, 1985 bp, Homo sapiens
cgccgagctttcggcacctctgccgggtggtaccgagccttcccggcgccccctcctctcctcccaccggcctgcccttccccgcgggactatcgcccccacgtttccctcagcccttttctctcccggccgagccgcggcggcagcagcagcagcagcagcagcaggaggaggagcccggtggcggcggtggccggggagcccatggcgtacagtcaaggaggcggcaaaaaaaaagtctgctactactacgacggtgatattggaaattattattatggacagggtcatcccatgaagcctcatagaatccgcatgacccataacttgctgttaaattatggcttatacagaaaaatggaaatatataggccccataaagccactgccgaagaaatgacaaaatatcacagtgatgagtatatcaaatttctacggtcaataagaccagataacatgtctgagtatagtaagcagatgcatatatttaatgttggagaagattgtccagcgtttgatggactctttgagttttgtcagctctcaactggcggttcagttgctggagctgtgaagttaaaccgacaacagactgatatggctgttaattgggctggaggattacatcatgctaagaaatacgaagcatcaggattctgttacgttaatgatattgtgcttgccatccttgaattactaaagtatcatcagagagtcttatatattgatatagatattcatcatggtgatggtgttgaagaagctttttatacaacagatcgtgtaatgacggtatcattccataaatatggggaatactttcctggcacaggagacttgagggatattggtgctggaaaaggcaaatactatgctgtcaattttccaatgtgtgatggtatagatgatgagtcatatgggcagatatttaagcctattatctcaaaggtgatggagatgtatcaacctagtgctgtggtattacagtgtggtgcagactcattatctggtgatagactgggttgtttcaatctaacagtcaaaggtcatgctaaatgtgtagaagttgtaaaaacttttaacttaccattactgatgcttggaggaggtggctacacaatccgtaatgttgctcgatgttggacatatgagactgcagttgcccttgattgtgagattcccaatgagttgccatataatgattactttgagtattttggaccagacttcaaactgcatattagtccttcaaacatgacaaaccagaacactccagaatatatggaaaagataaaacagcgtttgtttgaaaatttgcgcatgttacctcatgcacctggtgtccagatgcaagctattccagaagatgctgttcatgaagacagtggagatgaagatggagaagatccagacaagagaatttctattcgagcatcagacaagcggatagcttgtgatgaagaattctcagattctgaggatgaaggagaaggaggtcgaagaaatgtggctgatcataagaaaggagcaaagaaagctagaattgaagaagataagaaagaaacagaggacaaaaaaacagacgttaaggaagaagataaatccaaggacaacagtggtgaaaaaacagataccaaaggaaccaaatcagaacagctcagcaacccctgaatttgacagtctcaccaatttcagaaaatcattaaaaagaaaatattgaaaggaaaatgttttctttttgaagacttctggcttcattttatactactttggcatggactgtatttattttcaaatgggactttttcgtttttgtttttctgggcaagttttattgtgagattttctaattatgaagcaaaatttcttttctccaccatgctttatgtgatagtatttaaaattgatgtgagttattatgtcaaaaaaactgatctattaaagaagtaattggcctttctgagctgaaaaaaaaaaaaaaaaag

SEQ ID NO: 12 - DNA, 2429 bp, Homo sapiens
aagcggttgggaaagtgtcggtttatcttcgcgccccttgcgttcttgccgcggcttgcctgggcaggtaaagcgcgattgcgagagctcggcaaccctgccgactcagccggaaccggctcccggcccgaggggcgtggtgtcctggtgctccgactccttccgcaggctccttgggacccgcggttccgggagtcccttgctcagggtccctttcctgcagtgaggcgccgtccgccttccctgtgtccccgcagacccccatcatgggcaataccagcagtgagcgcgccgcgctggagcggcatggtggccataagacgccccggagggacagctcggggggcaccaaggacggggacaggcccaagatcctgatggacagccccgaagacgccgacctcttccactccgaggaaatcaaggcaccagagaaggaggaattcctggcctggcagcatgatctggaagtgaatgataaagctcccgcccaggctcggccaacggtgtttcgatggacggggggcggaaaggaagtttacttatctgggtccttcaacaactggagtaaacttcccctcaccagaagccacaataactttgtagccatcctggatctgccggaaggagagcatcagtacaagttctttgtggatggtcagtggacgcacgacccttccgagcccatagtaaccagccagcttggcacagttaacaacatcattcaagtgaagaaaactgactttgaagtatttgatgctttaatggtggattcccaaaagtgctccgatgtgtctgagctgtccagttctcccccaggaccctaccatcaggagccctacgtctgcaaacccgaagagcgctttcgggcaccccctattctccccccacatctcctccaggtcatcctgaacaaggacacggggatttcctgtgatccagctttgcttcctgagcccaatcacgtcatgctgaaccacctatacgcgctgtctatcaaggatggagtgatggtgctcagcgcaacccaccggtacaagaagaagtacgtcaccaccttgttatacaagcccatatgaagagctgggggcggatggtggcccaggagacagcacaccaccaggctccacacgtgcatgctttccccaagagggaatggactgtacattgctcatttcacactcttcagaagacatttcatacctgccctggtcctgcttgaaggtttgtccaggcagagcagctcctgcagcgcctcggtctgtgacagtcctcctagcacccccatggctttgagcctcggggactcatcaagtccaagaaaagagggaggggtggcagaggatctgcagccctggccccgcggtgcatgaggctgggtgcagttctaaacctacattctcgatttttcttaagccaaaaatgaatgctaactcctttgccagtaaaattctgggaaacagggactgaggccacacatcatttccagtcatctgtgtgtttttaaggccagccacttgtccctgttgaggcctggctatggaactaaatacagtgttggtcttgcctgtccttcaaaatcaacaacagattgtctctcggctccagggaggtgtcatttctatagaaattagaagctttctgatttctagatgaggttttacaattgtttcttacagtcatgtgcactaagtactctttttgtaagcagaggtggctggctctgcagccttaaggccattttttaagtcaccacgtctagaagtcacatgaactctgctcagcaataatctgttctcagaacagacttttcaacctgctgccggatttctccattcagctggatgatcctcaggactgaccagttagctggcaggttgtccagctttttattccagtcataataggtgacagtgttaaccgtgaaaacttgagaggcactctgccctcttccctataaaatcacacagcgtgattttacaaggtcccgtggcaccttgctcaggacctctgcccctagttagcaagactgcagcagttgctgttgcttattctgaaaggaatgtagaacttgacagcagccttctgagtctgggtcaggaagatgtcctttggaccaaagcagacttctgtatacgcagctcagtttcccgggagtcgccacagatgtacccactagcccaggttgctgtgagtcagcggaagctcccgttatgccctttgctcctggtgggagagggaggagtgagctccctgggttccagtatttacttggtatacctgagtttgggggtacccttttttgtgacttttcaaaacagtgaattactgtcaccttgatggacaagtttcaataaaactttgtaaaaaaaaaaaaaaaaaaaaaaaaaaaaaaaaaaaaaaaaaaaaaaaaaaaaaaaaaaaaaaaa

SEQ ID NO: 13 - DNA, 1654 bp, Homo sapiens
gaattcgggcggtcctcggagacacgcggcggtgtcctgtgttggccatggccgactacctgattagtgggggcacgtcctacgtgccagacgacggactcacagcacagcagctcttcaactgcggagacggcctcacctacaatgactttctcattctccctgggtacatcgacttcactgcagaccaggtggacctgacttctgctctgaccaagaaaatcactcttaagaccccactggtttcctctcccatggacacagtcacagaggctgggatggccatagcaatggcgcttacaggcggtattggcttcatccaccacaactgtacacctgaattccaggccaatgaagttcggaaagtgaagaaatatgaacagggattcatcacagaccctgtggtcctcagccccaaggatcgcgtgcgggatgtttttgaggccaaggcccggcatggtttctgcggtatcccaatcacagacacaggccggatggggagccgcttggtgggcatcatctcctccagggacattgattttctcaaagaggaggaacatgactgtttcttggaagagataatgacaaagagggaagacttggtggtagccccccgcagcatcacactgaaggaggcaaatgaaattctgcagcgcagcaagaagggaaagttgcccattgtaaatgaagatgatgagcttgtggccatcattgcccggacagacctgaagaagaatcgggactacccactagcctccaaagatgccaagaaacagctgctgtgtggggcagccattggcactcatgaggatgacaagtataggctggacttgctcgcccaggctggtgtggatgtagtggttttggactcttcccagggaaattccatcttccagatcaatatgatcaagtacatcaaagacaaataccctaatctccaagtcattggaggcaatgtggtcactgctgcccaggccaagaacctcattgatgcaggtgtggatgccctgcgggtgggcatgggaagtggctccatctgcattacgcaggaagtgctggcctgtgggcggccccaagcaacagcagtgtacaaggtgtcagagtatgcacggcgctttggtgttccggtcattgctgatggaggaatccaaaatgtgggtcatattgcgaaagccttggcccttggggcctccacagtcatgatgggctctctcctggctgccaccactgaggcccctggtgaatacttcttttccgatgggatccggctaaagaaatatcgcggtatgggttctctcgatgccatggacaagcacctcagcagccagaacagatatttcagtgaagctgacaaaatcaaagtggcccagggagtgtctggtgctgtgcaggacaaagggtcaatccacaaatttgtcccttacctgattgctggcatccaacactcatgccaggacattggtgccaagagcttgacccaagtccgagccatgatgtactctggggagcttaagtttgagaagagaacgtcctcagcccaggtggaaggtggcgtccatagcctccattcgtatgagaagcggcttttctgaaaagggatccagcacacctcctcggtttttttttcaataaaagtttagaaagacccgaattc

SEQ ID NO: 14 - DNA, 1799 bp, Homo sapiens
acactggggtggtgcttagccggcgccagaccgaccctcgacttcggagaggcagcgcggttcctctgggtgcttccgcctccccttctcctgcttctccagcctcttcggcctcctcgcccgccgcgggaacccgagaccccagtgtatgccccacccctgaccccgctcgcgacatgtccaccccggctcggcggcgcctcatgcgggacttcaagaggttgcaggaggatcctccagccggagtcagcggggctccgtccgagaacaacataatggtgtggaacgcggtcattttcgggcctgaagggaccccgtttgaggatggaacatttaaacttacaatagaattcactgaagaatatccaaataaaccacctacagttagatttgtctctaagatgttccatccaaatgtctatgcagatggtagtatatgtctggacatacttcagaaccgttggagtccaacctatgatgtgtcttccattctaacatccatacagtctctgttggatgaacccaatcccaatagtccagcaaacagccaggctgctcagctgtaccaggagaacaaacgggaatatgaaaagcgtgtttctgcaatagtagaacaaagctggcgtgattgttgaccccgggtacagtttaaagaagctggccataagaaaaatatatattgatgtgtttgtcacctccctactcctgtcattacatttactttattaaaagcaaaataactgttgtgctgtttccatcttccttgccaagttttcctaccccttctaccctctccttaaacatcagaaaacaccctctatgaaatcaaatgtactgtacctgggttacttgcaaaaattactaatgcttcagtttttctgttgtatttcatttccagttttcaggcagttatttttattattgtactttaagcttttaagatgaattgttatacaagaggtgcttatgcttagcttgatgaccaggatgttatttttaacaaaatgattgctgaagtgtttcatcctggctggtccttcacttgtgttggatttagaagtgaatgtgtttggaatatggcctacagagaatagaaacaaatccatgtaaacaattttgaaggaggcatgggagctaaaaatcctgtgatactaagatctcagtcatatgaattacaacgtagtatttactggcaagaaggagaaagttgaaggactcagctaaaggagtacagcaattgtagtaactgacacatcctctctttgcaagctgctgactgggcacactcatgccaagtttcagaattattggtcttctgggtttttgctttttaaaagaggtgtgggagcagaggaatggaaacaatcgtgagtttttgagctagggaaagttggagctcctttaatctttttaaaggatcagtgctgccctaagtgaataaactcaattgtccatctttattttagagttttaatgaattcaaggaagggagcatagcatatctgtggcaaactattttccactcaaatcctgagttattgctgcatgctttaatttcttccctttcagcatctgagaaccttaaagccaatgtctgcgatctttttttggatatttatacttttagatatatagtacctttaagtagcagtatgggacaaggcttgtaaatgttttgtctaatgttctattgtcaccttttatgcatttatcacttccaaatctaactttgcacaagtaacccatgtaaaaaaaaatgtacatttttcaaaagttgtaaataaaaataaccttaaaaa

SEQ ID NO: 15 - DNA, 1105 bp, Homo sapiens
ggggcttgtgggtctttgagacccgaaaattgagagcgttttcgcactccagcggctgctcctggcggctctgcggccgtcaccatgccacagaatgaatatattgaattacaccgtaaacgctatggataccgtttggattaccatgagaaaaagagaaagaaggaaagtcgagaggctcatgaacgttcaaagaaggcaaagaaaatgattggtctgaaggctaagctttaccataaacagcgtcatgctgagaaaatacaaatgaaaaagactatcaagatgcatgaaaagagaaacaccaaacaaaagaatgatgaaaagacaccacagggagcagtacctgcctatctgctggacagagagggacaatctcgagctaaagtactttccaatatgattaaacagaaaagaaaagagaaggcgggaaaatgggaagtccctctgcctaaagtacgtgcccagggagaaacagaagtattaaaagttattcgaacaggaaagagaaagaagaaggcatggaagagaatggttactaaagtgtgctttgttggagatggctttacaagaaaaccacctaaatatgaaagattcatcaggccaatgggcttgcgtttcaagaaagcccatgtaacacatcctgaactgaaagccaccttttgcctaccaatacttggtgtaaagaagaatccctcatccccactgtatacaactttgggtgttattaccaaaggtactgtcattgaagtaaatgtgagcgaattgggccttgtgacgcaaggaggcaaagttatttggggaaaatatgcccaggttaccaacaatcctgaaaatgatggatgtataaatgcagtcttactggtttgacagcaatttcatatataattattgaggactacacaccaattgaagaaactgccattactgtgatgtttctgaatactaccaaacagccatacatgtctgcaatgaagagatttattaaattgtaaacattaaagtggtccagttttataaatggtctttattttgaaatacgctttgaccccatgttcataaaactgaatgattgaaaaaaagcaaatatacaaatatcctacttcat

SEQ ID NO: 16 - DNA, 2905 bp, Homo sapiens
cctggcgcgcccggagttgctggttctgtgaggtagcggcggcaacgaccatggaggccacgtcccgggaggcggcgccagcgaagagctcggcctcgggccccaacgctccccccgccctgttcgagctgtgcgggcgggcggtgagcgcccatatgggggttctggagagcggggtgtgggccctcccaggcccaatacttcaaagcatcctacctctgctcaatatatattacttggagaggattgaggaaactgccctcaagaaaggcctctcaactcaggccatctggcgccgactctgggatgaactgatgaagacaaggccttccagtttggaaagtgtgacatgttggcgagccaagtttatggaggcctttttttcccatgttctacgtgggaccattgatgtgtcttctgacaggcgtctttgtgatcagcggttctcacctcttctgcacagctcccgccatgtccgacagctcaccatctgtaacatgctgcagggtgcaaccgagctggtggctgagcccaaccgcagggttctggagaccctggccagctccctgcacactctcaagttccgccacctgctgttctctgatgtggctgctcagcagtcacttcggcagctgttgcatcagctcattcaccatggggctgtcagtcaagtgtcgctatactcctggcctgtgcctgagtcagcccttttcatccttattctcaccatgagtgctggcttctggcaaccagggcctggtggcccaccctgccgcctctgtggagaggcctcccgaggccgggccccatcccgagatgaagggtccctcttattgggctcacgtcggccccgccgggatgctgctgagcgatgtgctgcagccctgatggccagccggcgtaagagtgaagccaagcagatgcccagagctgcacctgccactcgggtaacacgccggagcacacaggagagcctgacagcaggcggaacagaccttaagagggagctgcaccccccagccacctcccatgaggctcctggcaccaagcggtcaccttctgctccagcagccacctcctctgcctcttcttctacatcctcatacaaacgggcaccagctagctcagccccacagcctaagcccctaaagcgtttcaagcgagctgcagggaagaagggtgctcgcacccgtcaggggcctggtgcagagtctgaagacctgtatgacttcgtttttattgtggctggcgagaaggaggatggcgaagagatggagattggggaagtggcttgtggagctttggatggatcagatcccagctgcctggggcttccagcactggaagcttcacaaagattccgcagcatctccaccttggagctattcacagttccactctccacagaggcagccctgacactatgccacctgctgagctcctgggtgtcactggagagcctcacactctcctacaatggcctgggctctaacatcttccgcctgctagacagcctgcgggccctgtcaggccaggctggatgtcgcctccgtgccctgcatctcagtgacctgttctcaccactgcccatcctggagctgacacgtgctatcgtgcgagcactgcccctgctacgggtcctctctattcgtgttgaccacccaagccagcgggacaaccctggtgtgccagggaatgcagggccccctagccacataataggcgatgaggagataccagaaaactgcctggagcagttggagatgggatttccacggggagcccagccagccccactgctgtgctccgttctgaaggcctcgggttctctgcagcagctgtccctggatagtgccacctttgcctctccccaggattttgggcttgttttgcaaacactcaaagagtacaacctagccctgaaaagactgagcttccatgacatgaatctcgctgactgtcagagcgaggtgctctttttgctacagaatctgactctgcaagagattaccttctccttctgccgtctgtttgagaagcgcccagcccaatttctgcctgagatggttgctgctatgaagggcaactccacactgaagggcctccggctgccagggaaccgcctggggaatgctggcctgctggccttggcagatgttttctcagaggattcatcctcctctctctgtcagctggacatcagttccaactgcatcaagccagatgggcttctggagttcgccaagcggctggagcgctggggccgtggagcctttggtcacctgcgcctcttccaaaactggctggaccaggatgcagtcacagccagggaagccatccggcggctccgggctacctgccatgtggttagcgactcatgggactcatcccaggccttcgcagattatgttagcaccatgtgatggggcccgtacctcacagtctcatgctcggtaccatcagcttgcaggggctgaagcatgggctgcccagaaccccaaccaccagttctatctttctctttctgtcaccttttttctcttttttccttcttcccttgcactgaggtcctggaggccttgatgaggcccagcaaacaggcattctcacagctgggtttatagtctttgggccccttactcagtatcctgggaaccctgggccaggaggttacagtggtcatcataattgctgaagagatcccctcccctgcccctgggttcctgccttccctcctcaagcaggcacccaggctttagagaagtatagggggcttcttccctgctgggcttaccacactgctctcaggcctcaaaccctttcatacctttattcttttttttaaccaaaaaagtttttcttataaaataaattttgggcaaacatcaaaaaaaaaaaaaaaaaa

SEQ ID NO: 17 - DNA, 7787 bp, Homo sapiens
gagacaaaggctgccgtcgggacgggcgagttagggacttgggtttgggcgaacaaaaggtgagaaggacaagaagggaccgggcgatggcagcaggggagccccgcgggcgcgcgtcctcgggagtggcgccgtgacacgcatggtttccccggacccgcggcggcgctgacttccgcgagtcggagcggcactcggcgagtccgggactgcgctggaacaatggataacttcttcaccgagggaacacgggtctggctgagagaaaatggccagcattttccaagtactgtaaattcctgtgcagaaggcatcgtcgtcttccggacagactatggtcaggtattcacttacaagcagagcacaattacccaccagaaggtgactgctatgcaccccacgaacgaggagggcgtggatgacatggcgtccttgacagagctccatggcggctccatcatgtataacttattccagcggtataagagaaatcaaatatatacctacatcggctccatcctggcctccgtgaacccctaccagcccatcgccgggctgtacgagcctgccaccatggagcagtacagccggcgccacctgggcgagctgcccccgcacatcttcgccatcgccaacgagtgctaccgctgcctgtggaagcgctacgacaaccagtgcatcctcatcagtggtgaaagtggggcaggtaaaaccgaaagcactaaattgatcctcaagtttctgtcagtcatcagtcaacagtctttggaattgtccttaaaggagaagacatcctgtgttgaacgagctattcttgaaagcagccccatcatggaagctttcggcaatgcgaagaccgtgtacaacaacaactctagtcgctttgggaagtttgttcagctgaacatctgtcagaaaggaaatattcagggcgggagaattgtagattatttattagaaaaaaaccgagtagtaaggcaaaatcccggggaaaggaattatcacatattttatgcactgctggcagggctggaacatgaagaaagagaagaattttatttatctacgccagaaaactaccactacttgaatcagtctggatgtgtagaagacaagacaatcagtgaccaggaatcctttagggaagttattacggcaatggacgtgatgcagttcagcaaggaggaagttcgggaagtgtcgaggctgcttgctggtatactgcatcttgggaacatagaatttatcactgctggtggggcacaggtttccttcaaaacagctttgggcagatctgcggagttacttgggctggacccaacacagctcacagatgctttgacccagagatcaatgttcctcaggggagaagagatcctcacgcctctcaatgttcaacaggcagtagacagcagggactccctggccatggctctgtatgcgtgctgctttgagtgggtaatcaagaagatcaacagcaggatcaaaggcaatgaggacttcaagtctattggcatcctcgacatctttggatttgaaaactttgaggttaatcactttgaacagttcaatataaactatgcaaacgagaaacttcaggagtacttcaacaagcatattttttctttagaacaactagaatatagccgggaaggattagtgtgggaagatattgactggatagacaatggagaatgcctggacttgattgagaagaaacttggcctcctagcccttatcaatgaagaaagccattttcctcaagccacagacagcaccttattggagaagctacacagtcagcatgcgaataaccacttttatgtgaagcccagagttgcagttaacaattttggagtgaagcactatgctggagaggtgcaatatgatgtccgaggtatcttggagaagaacagagatacatttcgagatgaccttctcaatttgctaagagaaagccgatttgactttatctacgatctttttgaacatgtttcaagccgcaacaaccaggataccttgaaatgtggaagcaaacatcggcggcctacagtcagctcacagttcaaggactcactgcattccttaatggcaacgctaagctcctctaatcctttctttgttcgctgtatcaagccaaacatgcagaagatgccagaccagtttgaccaggcggttgtgctgaaccagctgcggtactcagggatgctggagactgtgagaatccgcaaagctgggtatgcggtccgaagaccctttcaggacttttacaaaaggtataaagtgctgatgaggaatctggctctgcctgaggacgtccgagggaagtgcacgagcctgctgcagctctatgatgcctccaacagcgagtggcagctggggaagaccaaggtctttcttcgagaatccttggaacagaaactggagaagcggagggaagaggaagtgagccacgcggccatggtgattcgggcccatgtcttgggcttcttagcacgaaaacaatacagaaaggtcctttattgtgtggtgataatacagaagaattacagagcattccttctgaggaggagatttttgcacctgaaaaaggcagccatagttttccagaagcaactcagaggtcagattgctcggagagtttacagacaattgctggcagagaaaagggagcaagaagaaaagaagaaacaggaagaggaagaaaagaagaaacgggaggaagaagaaagagaaagagagagagagcgaagagaagccgagctccgcgcccagcaggaagaagaaacgaggaagcagcaagaactcgaagccttgcagaagagccagaaggaagctgaactgacccgtgaactggagaaacagaaggaaaataagcaggtggaagagatcctccgtctggagaaagaaatcgaggacctgcagcgcatgaaggagcagcaggagctgtcgctgaccgaggcttccctgcagaagctgcaggagcggcgggaccaggagctccgcaggctggaggaggaagcgtgcagggcggcccaggagttcctcgagtccctcaatttcgacgagatcgacgagtgtgtccggaatatcgagcggtccctgtcggtgggaagcgaattttccagcgagctggctgagagcgcatgcgaggagaagcccaacttcaacttcagccagccctacccagaggaggaggtcgatgagggcttcgaagccgacgacgacgccttcaaggactcccccaaccccagcgagcacggccactcagaccagcgaacaagtggcatccggaccagcgatgactcttcagaggaggacccatacatgaacgacacggtggtgcccaccagccccagtgcggacagcacggtgctgctcgccccatcagtgcaggactccgggagcctacacaactcctccagcggcgagtccacctactgcatgccccagaacgctggggacttgccctccccagacggcgactacgactacgaccaggatgactatgaggacggtgccatcacttccggcagcagcgtgaccttctccaactcctacggcagccagtggtcccccgactaccgctgctctgtggggacctacaacagctcgggtgcctaccggttcagctctgagggggcgcagtcctcgtttgaagatagtgaagaggactttgattccaggtttgatacagatgatgagctttcataccggcgtgactctgtgtacagctgtgtcactctgccgtatttccacagctttctgtacatgaaaggtggcctgatgaactcttggaaacgccgctggtgcgtcctcaaggatgaaaccttcttgtggttccgctccaagcaggaggccctcaagcaaggctggctccacaaaaaaggggggggctcctccacgctgtccaggagaaattggaagaagcgctggtttgtcctccgccagtccaagctgatgtactttgaaaacgacagcgaggagaagctcaagggcaccgtagaagtgcgaacggcaaaagagatcatagataacaccaccaaggagaatgggatcgacatcattatggccgataggactttccacctgattgcagagtccccagaagatgccagccagtggttcagcgtgctgagtcaggtccacgcgtccacggaccaggagatccaggagatgcatgatgagcaggcaaacccacagaatgctgtgggcaccttggatgtggggctgattgattctgtgtgtgcctctgacagccctgatagacccaactcgtttgtgatcatcacggccaaccgggtgctgcactgcaacgccgacacgccggaggagatgcaccactggataaccctgctgcagaggtccaaaggggacaccagagtggagggccaggaattcatcgtgagaggatggttgcacaaagaggtgaagaacagtccgaagatgtcttcactgaaactgaagaaacggtggtttgtactcacccacaattccctggattactacaagagttcagagaagaacgcgctcaaactggggaccctggtcctcaacagcctctgctctgtcgtccccccagatgagaagatattcaaagagacaggctactggaacgtcaccgtgtacgggcgcaagcactgttaccggctctacaccaagctgctcaacgaggccacccggtggtccagtgccattcaaaacgtgactgacaccaaggccccgatcgacacccccacccagcagctgattcaagatatcaaggagaactgcctgaactcggatgtggtggaacagatttacaagcggaacccgatccttcgatacacccatcaccccttgcactccccgctcctgccccttccgtatggggacataaatctcaacttgctcaaagacaaaggctataccacccttcaggatgaggccatcaagatattcaattccctgcagcaactggagtccatgtctgacccaattccaataatccagggcatcctacagacagggcatgacctgcgacctctgcgggacgagctgtactgccagcttatcaaacagaccaacaaagtgccccaccccggcagtgtgggcaacctgtacagctggcagatcctgacatgcctgagctgcaccttcctgccgagtcgagggattctcaagtatctcaagttccatctgaaaaggatacgggaacagtttccaggaaccgagatggaaaaatacgctctcttcacttacgaatctcttaagaaaaccaaatgccgagagtttgtgccttcccgagatgaaatagaagctctgatccacaggcaggaaatgacatccacggtctattgccatggcggcggctcctgcaagatcaccatcaactcccacaccactgctggggaggtggtggagaagctgatccgaggcctggccatggaggacagcaggaacatgtttgctttgtttgaatacaacggccacgtcgacaaagccattgaaagtcgaaccgtcgtagctgatgtcttagccaagtttgaaaagctggctgccacatccgaggttggggacctgccatggaaattctacttcaaactttactgcttcctggacacagacaacgtgccaaaagacagtgtggagtttgcatttatgtttgaacaggcccacgaagcggttatccatggccaccatccagccccggaagaaaacctccaggttcttgctgccctgcgactccagtatctgcagggggattatactctgcacgctgccatcccacctctcgaagaggtttattccctgcagagactcaaggcccgcatcagccagtcaaccaaaaccttcaccccttgtgaacggctggagaagaggcggacgagcttcctagaggggaccctgaggcggagcttccggacaggatccgtggtccggcagaaggtcgaggaggagcagatgctggacatgtggattaaggaagaagtctcctctgctcgagccagtatcattgacaagtggaggaaatttcagggaatgaaccaggaacaggccatggccaagtacatggccttgatcaaggagtggcctggctatggctcgacgctgtttgatgtggagtgcaaggaaggtggcttccctcaggaactctggttgggtgtcagcgcggacgccgtctccgtctacaagcgtggagagggaagaccactggaagtcttccagtatgaacacatcctctcttttggggcacccctggcgaatacgtataagatcgtggtcgatgagagggagctgctctttgaaaccagtgaggtggtggatgtggccaagctcatgaaagcctacatcagcatgatcgtgaagaagcgctacagcacgacacgctccgccagcagccagggcagctccaggtgaaggcgggacagagcccacctgtctttgctacctgaacgcaccaccctctggcctaggctggctccagtgtgccatgcccagccaaaacaaacacagagctgcccaggctttctggaagcttctggtctgagggaggtgtctccgaggatccttttgcctgccgccttcattgatcctgtattaagctgtcaactttaacagtctgcacagtttccaaagctttactactcttagaggacacatgccttaaaaaaggaggggaggaaccacgctgccaccaaagcagccggaagtgccttaacttgtggaaccaacactaatcgaccgtaactgtgctactgaagggaactgcctttcccccttctgggggagacttaacagagcgtggaaggggggcattctctgtcaatgatgcactaacctcccaacctgatttccccgaatctgagggaaggtgagggagtgggaagggggatggagagctcgaggggacagtgtgtttgagctggagtgctgcgggcagcctttctcatggaatgacatgaatcaacttttttctttgtttcatcttttaagtgtacgtgcttgcctgttcgtgcatgtgttcataaactcaacactttaatcatggtttcatgagcattaaaaagcaaagggaaaaaggatgtgtaatggtgtacacagtctgtatattttaataatgcagagctatagtctcaattgttactttataaggtggttttattaacaaacccaaatcctggattttcctgtctttgctgtattttgaaaaacacgtgttgactccattgttttacatgtagcaaagtctgccatctgtgtctgctgtattataaacagataagcagcctacaagataactgtatttataaaccactcttcaacagctggctccagtgctggttttagaacaagaatgaagtcattttggagtctttcatgtctaaaagatttaagttaaaaacaaagtgttacttggaaggttagcttctatcattctggatagattacagatataataaccatgttgactatgggggagagacgctgcattccagaaacgtcttaacacttgagtgaatcttcaaaggaccctgacattaaatgctgaggctttaatacacacatattttatcccaagtttataatggtggtctgaacaaggcacctgtaaataaatcagcatttatgaccagaagaaaaataatctggtcttggactttttatttttatatggaaaagttttaaggacttgggccaactaagtctacccacacgaaaaaagaaatttgccttgtccctttgtgtacaaccatgcaaaactgtttgttggctcacagaagttctgacaataaaagatactagct

SEQ ID NO: 18 - DNA, 5512 bp, Homo sapiens
gagctagccccggcggccgccgccgcccagaccggacgacaggccacctcgtcggcgtccgcccgagtccccgcctcgccgccaacgccacaaccaccgcgcacggccccctgactccgtccagtattgatcgggagagccggagcgagctcttcggggagcagcgatgcgaccctccgggacggccggggcagcgctcctggcgctgctggctgcgctctgcccggcgagtcgggctctggaggaaaagaaagtttgccaaggcacgagtaacaagctcacgcagttgggcacttttgaagatcattttctcagcctccagaggatgttcaataactgtgaggtggtccttgggaatttggaaattacctatgtgcagaggaattatgatctttccttcttaaagaccatccaggaggtggctggttatgtcctcattgccctcaacacagtggagcgaattcctttggaaaacctgcagatcatcagaggaaatatgtactacgaaaattcctatgccttagcagtcttatctaactatgatgcaaataaaaccggactgaaggagctgcccatgagaaatttacaggaaatcctgcatggcgccgtgcggttcagcaacaaccctgccctgtgcaacgtggagagcatccagtggcgggacatagtcagcagtgactttctcagcaacatgtcgatggacttccagaaccacctgggcagctgccaaaagtgtgatccaagctgtcccaatgggagctgctggggtgcaggagaggagaactgccagaaactgaccaaaatcatctgtgcccagcagtgctccgggcgctgccgtggcaagtcccccagtgactgctgccacaaccagtgtgctgcaggctgcacaggcccccgggagagcgactgcctggtctgccgcaaattccgagacgaagccacgtgcaaggacacctgccccccactcatgctctacaaccccaccacgtaccagatggatgtgaaccccgagggcaaatacagctttggtgccacctgcgtgaagaagtgtccccgtaattatgtggtgacagatcacggctcgtgcgtccgagcctgtggggccgacagctatgagatggaggaagacggcgtccgcaagtgtaagaagtgcgaagggccttgccgcaaagtgtgtaacggaataggtattggtgaatttaaagactcactctccataaatgctacgaatattaaacacttcaaaaactgcacctccatcagtggcgatctccacatcctgccggtggcatttaggggtgactccttcacacatactcctcctctggatccacaggaactggatattctgaaaaccgtaaaggaaatcacagggtttttgctgattcaggcttggcctgaaaacaggacggacctccatgcctttgagaacctagaaatcatacgcggcaggaccaagcaacatggtcagttttctcttgcagtcgtcagcctgaacataacatccttgggattacgctccctcaaggagataagtgatggagatgtgataatttcaggaaacaaaaatttgtgctatgcaaatacaataaactggaaaaaactgtttgggacctccggtcagaaaaccaaaattataagcaacagaggtgaaaacagctgcaaggccacaggccaggtctgccatgccttgtgctcccccgagggctgctggggcccggagcccagggactgcgtctcttgccggaatgtcagccgaggcagggaatgcgtggacaagtgcaaccttctggagggtgagccaagggagtttgtggagaactctgagtgcatacagtgccacccagagtgcctgcctcaggccatgaacatcacctgcacaggacggggaccagacaactgtatccagtgtgcccactacattgacggcccccactgcgtcaagacctgcccggcaggagtcatgggagaaaacaacaccctggtctggaagtacgcagacgccggccatgtgtgccacctgtgccatccaaactgcacctacggatgcactgggccaggtcttgaaggctgtccaacgaatgggcctaagatcccgtccatcgccactgggatggtgggggccctcctcttgctgctggtggtggccctggggatcggcctcttcatgcgaaggcgccacatcgttcggaagcgcacgctgcggaggctgctgcaggagagggagcttgtggagcctcttacacccagtggagaagctcccaaccaagctctcttgaggatcttgaaggaaactgaattcaaaaagatcaaagtgctgggctccggtgcgttcggcacggtgtataagggactctggatcccagaaggtgagaaagttaaaattcccgtcgctatcaaggaattaagagaagcaacatctccgaaagccaacaaggaaatcctcgatgaagcctacgtgatggccagcgtggacaacccccacgtgtgccgcctgctgggcatctgcctcacctccaccgtgcagctcatcacgcagctcatgcccttcggctgcctcctggactatgtccgggaacacaaagacaatattggctcccagtacctgctcaactggtgtgtgcagatcgcaaagggcatgaactacttggaggaccgtcgcttggtgcaccgcgacctggcagccaggaacgtactggtgaaaacaccgcagcatgtcaagatcacagattttgggctggccaaactgctgggtgcggaagagaaagaataccatgcagaaggaggcaaagtgcctatcaagtggatggcattggaatcaattttacacagaatctatacccaccagagtgatgtctggagctacggggtgaccgtttgggagttgatgacctttggatccaagccatatgacggaatccctgccagcgagatctcctccatcctggagaaaggagaacgcctccctcagccacccatatgtaccatcgatgtctacatgatcatggtcaagtgctggatgatagacgcagatagtcgcccaaagttccgtgagttgatcatcgaattctccaaaatggcccgagacccccagcgctaccttgtcattcagggggatgaaagaatgcatttgccaagtcctacagactccaacttctaccgtgccctgatggatgaagaagacatggacgacgtggtggatgccgacgagtacctcatcccacagcagggcttcttcagcagcccctccacgtcacggactcccctcctgagctctctgagtgcaaccagcaacaattccaccgtggcttgcattgatagaaatgggctgcaaagctgtcccatcaaggaagacagcttcttgcagcgatacagctcagaccccacaggcgccttgactgaggacagcatagacgacaccttcctcccagtgcctgaatacataaaccagtccgttcccaaaaggcccgctggctctgtgcagaatcctgtctatcacaatcagcctctgaaccccgcgcccagcagagacccacactaccaggacccccacagcactgcagtgggcaaccccgagtatctcaacactgtccagcccacctgtgtcaacagcacattcgacagccctgcccactgggcccagaaaggcagccaccaaattagcctggacaaccctgactaccagcaggacttctttcccaaggaagccaagccaaatggcatctttaagggctccacagctgaaaatgcagaatacctaagggtcgcgccacaaagcagtgaatttattggagcatgaccacggaggatagtatgagccctaaaaatccagactctttcgatacccaggaccaagccacagcaggtcctccatcccaacagccatgcccgcattagctcttagacccacagactggttttgcaacgtttacaccgactagccaggaagtacttccacctcgggcacattttgggaagttgcattcctttgtcttcaaactgtgaagcatttacagaaacgcatccagcaagaatattgtccctttgagcagaaatttatctttcaaagaggtatatttgaaaaaaaaaaaaaaagtatatgtgaggatttttattgattggggatcttggagtttttcattgtcgctattgatttttacttcaatgggctcttccaacaaggaagaagcttgctggtagcacttgctaccctgagttcatccaggcccaactgtgagcaaggagcacaagccacaagtcttccagaggatgcttgattccagtggttctgcttcaaggcttccactgcaaaacactaaagatccaagaaggccttcatggccccagcaggccggatcggtactgtatcaagtcatggcaggtacagtaggataagccactctgtcccttcctgggcaaagaagaaacggaggggatgaattcttccttagacttacttttgtaaaaatgtccccacggtacttactccccactgatggaccagtggtttccagtcatgagcgttagactgacttgtttgtcttccattccattgttttgaaactcagtatgccgcccctgtcttgctgtcatgaaatcagcaagagaggatgacacatcaaataataactcggattccagcccacattggattcatcagcatttggaccaatagcccacagctgagaatgtggaatacctaaggataacaccgcttttgttctcgcaaaaacgtatctcctaatttgaggctcagatgaaatgcatcaggtcctttggggcatagatcagaagactacaaaaatgaagctgctctgaaatctcctttagccatcaccccaaccccccaaaattagtttgtgttacttatggaagatagttttctccttttacttcacttcaaaagctttttactcaaagagtatatgttccctccaggtcagctgcccccaaaccccctccttacgctttgtcacacaaaaagtgtctctgccttgagtcatctattcaagcacttacagctctggccacaacagggcattttacaggtgcgaatgacagtagcattatgagtagtgtgaattcaggtagtaaatatgaaactagggtttgaaattgataatgctttcacaacatttgcagatgttttagaaggaaaaaagttccttcctaaaataatttctctacaattggaagattggaagattcagctagttaggagcccattttttcctaatctgtgtgtgccctgtaacctgactggttaacagcagtcctttgtaaacagtgttttaaactctcctagtcaatatccaccccatccaatttatcaaggaagaaatggttcagaaaatattttcagcctacagttatgttcagtcacacacacatacaaaatgttccttttgcttttaaagtaatttttgactcccagatcagtcagagcccctacagcattgttaagaaagtatttgatttttgtctcaatgaaaataaaactatattcatttcc

SEQ ID NO: 19 - DNA, 1791 bp, Homo sapiens
cctcgtgccagagaaacatgtatcgttttcgatcacagctcttcacggggatttctgctgccgccaccgcccactcttacccccgccgcttctcgactctgttgttagccgaagactcgcctctcagccgcccgccgcacagacgcacgagtaaaaagtgcagctccatcggctgatcctcgctaagctccgactctgggcggcaccgggcgtcccacgatgccgaagaacaagaagcggaacactccccaccgcggtagcagtgctggcggcggcgggtcaggagcagccgcagcgacggcggcgacagcaggtggccagcatcgaaatgttcagccttttagtgatgaagatgcatcaattgaaacaatgagccattgcagtggttatagcgatccttccagttttgctgaagatggaccagaagtccttgatgaggaaggaactcaagaagacctagagtacaagagaaagggattaattgacctaaccctggataagagtgcgaagacaaggcaagcagctcttgaaggtattaaaaatgcactggcttcaaaaatgctgtatgaatttattctggaaaggagaatgactttaactgatagcattgaacgctgcctgaaaaaaggtaagagtgatgagcaacgtgcagctgcagcgttagcatctgttctttgtattcagctgggccctggaattgaaagtgaagagattttgaaaactcttggaccaatcctaaagaaaatcatttgtgatgggtcagctagtatgcaggctaggcaaacttgtgcaacttgctttggtgtttgctgttttattgccacagatgacattactgaactatactcaactctggaatgtttggaaaatatcttcactaaatcctatctcaaagagaaagacactactgttatttgcagcactcctaatacagtgcttcatatcagctctcttcttgcatggacactactgctgaccatatgcccaatcaatgaagtgaagaaaaagcttgagatgcatttccataagcttccaagcctcctctcttgtgatgatgtaaacatgagaatagctgctggtgaatctttggcacttctctttgaattggccagaggaatagagagtgactttttttatgaagacatggagtccttgacgcagatgcttagggccttggcaacagatggaaataaacaccgggccaaagtggacaagagaaagcagcggtcagttttcagagatgtcctgagggcagtggaggaacgggattttccaacagaaaccattaaatttggtcctgaacgcatgtatattgattgctgggtaaaaaaacacacctatgacacctttaaggaggttcttggatcagggatgcagtacccacttgcagtcaaaatggaattcctcgaaaatgtatttgaaacttggacccccagtgatgccttgatgctgcaacgccttaaaacgatgaagatttctcgtttcgaaaggcatttatataactctgcagccttcaaagctcgaaccaaagctagaagcaaatgtcgagataagagagcagatgttggagaattcttctagattttcagaacttgaagactattttctaatttctatttttttttctatttcaatgtatttaaactctagacacagtttttatcttggattaacttagataacttttgtagccagtggttatattgcttataatttaatgtacaatactattgaaactggtgagttctgattattaaatattctctgtaaatcagtaaacatgtataaagt

SEQ ID NO: 20 - DNA, 1299 bp, Homo sapiens
agtcctcttccgggtgatggcggcgggtgccccggatgtagccctggcgcaagcatctcttcttttttccacctcgccttccgcggattcccagcttgagaaacacctctttgccccgtcatgccaaagaggaaagtgaccttccaaggcgtgggagatgaggaggatgaggatgaaatcattgtccccaagaagaagctggtggaccctgtggctgggtcagggggtcctgggagccgctttaaaggcaaacactctttggatagcgatgaggaggaggatgatgatgatggggggtccagcaaatatgacatcttggcctcagaggatgtagaaggtcaggaggcagccacactccccagcgaggggggtgttcggatcacaccctttaacctgcaggaggagatggaggaaggccactttgatgccgatggcaactacttcctgaaccgggatgctcagatccgagacagctggctggacaacattgactgggtgaagatccgggagcggccacctggccagcgccaggcctcagactcggaggaggaggacagcttgggccagacctcaatgagtgcccaagccctcttggagggacttttggagctcctattgcctagagagacagtggctggggcactgaggcgtctgggggcccgaggaggaggcaaagggagaaaggggcctgggcaacccagttcccctcagcgcctggaccggctctccgggttggccgaccagatggtggcccggggcaaccttggtgtgtaccaggaaacaagggaacggttggctatgcgtctgaagggtttggggtgtcagaccctaggaccccacaatcccacacccccaccctccctggacatgttcgctgaggagttggcggaggaggaactggagaccccaacccctacccagagaggagaagcagagtcgcggggagatggtctggtggatgtgatgtgggaatataagtgggagaacacgggggatgccgagctgtatgggcccttcaccagcgcccagatgcagacctgggtgagtgaaggctacttcccggacggtgtttattgccggaagctggacccccctggtggtcagttctacaactccaaacgcattgactttgacctctacacctgagcctgctgggggcccagtttggtgggcccttctttcctggactttgtggaggaggcaccaagtgtctcaggcagcgaggaaattggaggccatttttcagtcaatttccctttcccaataaaagcctttagttgtgtaaaaaaaaaaaaaaaa

SEQ ID NO: 21 - DNA, 900 bp, Homo sapiens
gggactcggcggaggatgggcttgctctcaattttgcgcaagttgaaaagtgcaccagaccaggaggtgagaatacttctcctgggcttggataatgctggcaagaccactcttctgaagcagcttgcatctgaagacatcagccacatcacacctacacagggtttcaacatcaaaagtgtacaatcacaaggttttaaactgaatgtatgggacattggtggacagaggaaaatcagaccatactggaagaattattttgaaaataccgatattcttatatatgtaatcgacagtgcagacagaaaaagatttgaagagacgggtcaggaactagcggaattactggaggaagaaaaactaagttgtgtgccagtgctcatctttgctaataagcaggatttgctcacagcagcccctgcctctgaaattgcagaaggactgaacctgcataccatccgcgaccgagtctggcagatccagtcttgctcagctctcacaggagagggcgttcaggatggcatgaactgggtctgcaaaaatgtcaatgcaaagaagaaataaaatctagacgaatggagatgcaggagctgcgggagccgaattcgggccttaaaaacactaatttgctgctttctgaccaaatgtttttcatctgtgtacactccagctgtttgaagagagggaacaacacggtttagaaagaatccccattccagcagtagatttaactgatctctgaggttcagtatcatttttcaaataaaggaattatattatttcctctgcataattgaaatagtattaaatgtctaaagcacatgattagaaaatgagatcttttaaatgagcaagagattgcattgcagtttagacaattccagtgggctttttttttcg

SEQ ID NO: 22 - DNA, 1530 bp, Homo sapiens
aatcctggaacaaggctacagcgtcgaagatccccagcgctgcgggctcggagagcagtcctaacggcgcctcgtacgctagtgtcctcccttttcagtccgcgtccctccctgggccgggctggcactcttgccttccccgtccctcatggcgctgctccgacgcccgacggtgtccagtgatttggagaatattgacacaggagttaattctaaagttaagagtcatgtgactattaggcgaactgttttagaagaaattggaaatagagttacaaccagagcagcacaagtagctaagaaagctcagaacaccaaagttccagttcaacccaccaaaacaacaaatgtcaacaaacaactgaaacctactgcttctgtcaaaccagtacagatggaaaagttggctccaaagggtccttctcccacacctgaggatgtctccatgaaggaagagaatctctgccaagctttttctgatgccttgctctgcaaaatcgaggacattgataacgaagattgggagaaccctcagctctgcagtgactacgttaaggatatctatcagtatctcaggcagctggaggttttgcagtccataaacccacatttcttagatggaagagatataaatggacgcatgcgtgccatcctagtggattggctggtacaagtccactccaagtttaggcttctgcaggagactctgtacatgtgcgttggcattatggatcgatttttacaggttcagccagtttcccggaagaagcttcaattagttgggattactgctctgctcttggcttccaagtatgaggagatgttttctccaaatattgaagactttgtttacatcacagacaatgcttataccagttcccaaatccgagaaatggaaactctaattttgaaagaattgaaatttgagttgggtcgacccttgccactacacttcttaaggcgagcatcaaaagccggggaggttgatgttgaacagcacactttagccaagtatttgatggagctgactctcatcgactatgatatggtgcattatcatccttctaaggtagcagcagctgcttcctgcttgtctcagaaggttctaggacaaggaaaatggaacttaaagcagcagtattacacaggatacacagagaatgaagtattggaagtcatgcagcacatggccaagaatgtggtgaaagtaaatgaaaacttaactaaattcatcgccatcaagaataagtatgcaagcagcaaactcctgaagatcagcatgatccctcagctgaactcaaaagccgtcaaagaccttgcctccccactgataggaaggtcctaggctgccgtgggccctggggatgtgtgcttcattgtgccctttttcttattggtttagaactcttgattttgtacatagtcctctggtctatctcatgaaacctcttctcagaccagttttctaaacatatattgaggaaaaataaagcgattggtttttcttaaggtaaaaaaaaaaaaaaaaaa

SEQ ID NO: 23 - DNA, 2863 bp, Homo sapiens
cggaattcaagaaacacaaaatgcagtgggcgtccctcctgctgctggcagggctcttctccctctcccaggcccagtatgaagatgaccctcattggtggttccactacctccgcagccagcagtccacctactacgatccctatgacccttacccgtatgagacctacgagccttacccctatggggtggatgaagggccagcctacacctacggctctccatcccctccagatccccgcgactgcccccaggaatgcgactgcccacccaacttcctcacggccatgtactgtgacaatcgcaacctcaagtacctgcccttcgttccctcccgcatgaagtatgtgtacttccagaacaaccagatcacctccatccaggaaggcgtctttgacaatgccacagggctgctctggattgctctccacggcaaccagatcaccagtgataaggtgggcaggaaggtcttctccaagctgaggcacctggagaggctgtacctggaccacaacaacctgacccggatgcccggtcccctgcctcgatccctgagagagctccatctcgaccacaaccagatctcacgggtccccaacaatgctctggaggggctggagaacctcacggccttgtacctccaacacgatgagatccaggaagtgggcagttccatgaggggcctccggtcactgatcttgctggacctgagttataaccaccttcggaaggtgcctgatgggctgccctcagctcttgagcagctgtacatggagcacaacaatgtctacaccgtccccgatagctacttccggggggcgcccaagctgctgtatgtgcggctgtcccacaacagtctaaccaacaatggcctggcctccaacaccttcaattccagcagcctccttgagctagacctctcctacaaccagctgcagaagatccccccagtcaacaccaacctggagaacctctacctccaaggcaataggatcaatgagttctccatcagcagcttctgcaccgtggtggacgtcgtgaacttctccaagctgcaggtcgtgcgcctggacgggaacgagatcaagcgcagcgccatgcctgccgacgcgcccctctgcctgcgccttgccagcctcatcgagatctgagcagccctggcaccgggtactgggcggagagcccccgtggcatttggcttgatggtttggtttggcttatggaagatctgggacagaccgtgtgacagaagtccacgggcaccctctgtagtcttctttcctgtaggtggggttagggggggcgatcagggacaggcagccttctgctgaggacataggcagaagctcactcttttccagggacagaagtggtggtagatggaaggatccctggatgttccaaccccataaatctcacggctcttaagttcttcccaatgatctgaggtcatggaacttcaaaagtggcatgggcaatagtatataaccatacttttctaacaatccctggctgtctgtgagcagcacttgacagctctccctctgtgctgggctggtcgtgcagttactctgggctcccatttgttgcttctcaaaatatacctcttgcccagctgcctcttctgaaatccacttcacccactccactttcctccacagatgcctcttctgtgccttaagcagagtcaggagaccccaaggcatgtgagcatctgcccagcaacctgtggagacaacccacactgtgtctgagggtgaaaggacaccaggagtcacttctatacctccctaacctcacccctggaaagccaccagattggaggtcaccagcatgatgataatattcatgacctgatgtgggaggagacagccaacctcaggcttagatcaatgtatagggctatattttggcagctgggtagctctttgaaggtggataagacttcagaagaggaaaggccagactttgcttaccatcagcatctgcaatgggccaaacacacctcaaattggctgagttgagaaagcagccccagtagttccattcttgcccagcactttctgcattccaaacagcatcctacctgggtttttatccacaaaggtagcggccacatggtttttaaagtatgagaaacacagtttgtcctctccttttatccaagcaggaagattctatatcctgatggtagagacagactccaggcagccctggacttgctagcccaaagaaggaggatgtggttaatctgtttcacctggtttgtcctaaggccatagttaaaaagtaccagctctggctggggtccgtgaagcccaggccaggcagccaaatcttgcctgtgctgggcatacaaccctctgctttcacatctctgagctatatcctcattagtgaaggtggcttttgctttatagtttggctggggagcacttaattcttcccatttcaaaaggtaatgttgcctggggcttaacccacctgccctttgggcaaggttgggacaaagccatctgggcagtcaggggcaaggactgttggaggagagttagcccaagtataggctctgcccagatgccatcacatccctgatactgtgtatgctttgaagcaccttccctgagaagggaagaggggatctttggactacgttcttggctccagacctggaatccacaaaagccaaaccagctcatttcaacaaaggagctccgatgtgaggggcaaggctgccccctgccccagggctcttcagaaagcatctgcatgtgaacaccatcatgcctttataaaggatccttattacaggaaaagcatgagtggtggctaacctgaccaataaagttattttatgattgcc

SEQ ID NO: 24 - DNA, 4237 bp, Homo sapiens
tcccgaaaccagagggatggggccggctgtgcagtagaacggggatcgaaaagaggaaaacaagggcacgaagaccagcgagaaagaagaggacacctgggaaaggcggaagcagaagacggggaagggaaaagaaacccatagcaggtggaaaccagatctagagcaacaccgtcaggttcacagtttgtttttctagaagagaagaaagtacctgaggattgctcttttttcctaccgttaatgaaaactacttttgtcttcatcataaaagaaaaaactaaggggaggtaaaggcagtctcctgttttattagggggagaggtgaagggaaatccaggctcactttctgaataagccactgcctggtgcacagagcagaaccatcctggtttctgaagacacatccctttcagcagaattccagccggagtcgctggcacagttctatttttatatttaaatgtatgtctcccctggcctttttttttttttttttttttagcaacacttttcttgtttgtaaacgcgagtgaccagaaagtgtgaatgcggagtaggaatatttttcgtgttctcttttatctgcttgccttttttagagagtagcagtggttcctatttcggaaaaggacgttctaattcaaagctctctcccaatatatttacacgaatacgcatttagaaagggaggcagcttttgaggttgcaatcctactgagaaggatggaagaaggagccaggcaccgaaacaacaccgaaaagaaacacccaggtgggggcgagtcggacgccagccccgaggctggttccggagggggcggagtagccctgaagaaagagatcggattggtcagtgcctgtggtatcatcgtagggaacatcatcggctctggaatctttgtctcgccaaagggagtgctggagaatgctggttctgtgggccttgctctcatcgtctggattgtgacgggcttcatcacagttgtgggagccctctgctatgctgaactcggggtcaccatccccaaatctggaggtgactactcctatgtcaaggacatcttcggaggactggctgggttcctgaggctgtggattgctgtgctggtgatctaccccaccaaccaggctgtcatcgccctcaccttctccaactacgtgctgcagccgctcttccccacctgcttccccccagagtctggccttcggctcctggctgccatctgcttattgctcctcacatgggtcaactgttccagtgtgcggtgggccacccgggttcaagacatcttcacagctgggaagctcctggccttggccctgattatcatcatggggattgtacagatatgcaaaggagagtacttctggctggagccaaagaatgcatttgagaatttccaggaacctgacatcggcctcgtcgcactggctttccttcagggctcctttgcctatggaggctggaactttctgaattacgtgactgaggagcttgttgatccctacaagaaccttcccagagccatcttcatctccatcccactggtcacatttgtgtatgtctttgccaatgtcgcttatgtcactgcaatgtccccccaggagctgctggcatccaacgccgtcgctgtgacttttggagagaagctcctaggagtcatggcctggatcatgcccatttctgttgccctgtccacatttggaggagttaatgggtctctcttcacctcctctcggctgttcttcgctggagcccgagagggccaccttcccagtgtgttggccatgatccacgtgaagcgctgcaccccaatcccagccctgctcttcacatgcatctccaccctgctgatgctggtcaccagcgacatgtacacactcatcaactatgtgggcttcatcaactacctcttctatggggtcacggttgctggacagatagtccttcgctggaagaagcctgatatcccccgccccatcaagatcaacctgctgttccccatcatctacttgctgttctgggccttcctgctggtcttcagcctgtggtcagagccggtggtgtgtggcattggcctggccatcatgctgacaggagtgcctgtctatttcctgggtgtttactggcaacacaagcccaagtgtttcagtgacttcattgagctgctaaccctggtgagccagaagatgtgtgtggtcgtgtaccccgaggtggagcggggctcagggacagaggaggctaatgaggacatggaggagcagcagcagcccatgtaccaacccactcccacgaaggacaaggacgtggcggggcagccccagccctgaggaccaccattccctggctactctctccttcctcccccttttatcctacctccctgccttggtcctgccaacacatgcgagtacacacacacccctctctctgcttttgtcaggcagtggtaggactttggtgtgggtggtgagaaattgtaaacaaaaactgacattcatacccaaagaaccagcctctcaccccagggtccatgtcccaggccccactccagtgctgcccacactcccagctgctggaggagaggggagatgccaaggtgccctgcaggacctccctccgggccacaccctcagctgcctcttcaggaaccggagctcattactgccttccctcccagggaggccccttcagagaggagaggccacaggagctgcattgtggggggacaggctcaagcaattctgtccccatcaaggggtcagctggagagacccaagaccctatctgttcaccagggacccaaaatccaaggggatgcttccctctgccctctttcctgcccctccccatcatacctgcacccaccccagccagggctccctgtccagaattcggttctcctcaggacgccaactcccagagctaaggaccaaggagaagaacagcctctccacccccaagccaggcggttgaggaacatattgagaaaggttcagattgcagaaacccagccctgcccctgcctcctgcatccagcccccaacatggtgccaaagcttccagaagccaaaaagcttctgatttttaaggtagtgggcatctctctcctaatgacgaagctgctcagcaactccacctgcccgccgcaggaaggagcagtcccctgctatccctgcagccactcccagcacacccgcacacagccagcaccaccgcccccaccgtgcacttctcctctctgggccttggcttgggaccaggtacgaaggatccccaagcccttcaggcctgagatcagagccagatcagccttaagtcacctcccatccaagaacttggcctaaaaatactcccctatttctaaccctcaggacggatctgatattaaatgccttccctgggaggaagggtgctttccccctccctagaggtgcccattccataccctgggagactgaggagagcattggctgaagcccagttcctttcccatccatccccaactccaataatcccccactcctcgcaggtctcagtgtcatgctgtcttggggcagggtgaaagggtagtggcagcagggcgcccactctggagatcctcaaaaaaggccctcctctgtggctggcagcctctgacctttccctgggcttcaaaggaaggctatggagtttgctgtgggccctgcaaccttcccagccactcctgctgcactaaggacttaggatccttttatcacaaatcgggattctctcccccaccccgaattctgtctgcttaaactggaatacacaggagcccttcctggcctggatggtgtctcccagcttccccgcccagcttgcccaccccatagttggtgagatgccaagtttggtctgagttgtgaccccttcagagtagatgcccggcaggctggggttggcccctggagggtcaggggaccatcttcttattccctcttttctcattcctccaacttcctcccctccttcaattatttttttgtaaagttgatgccttactttttggataaatatttttgaagctggtatttctatttcttttggattttttttaatgtaaggttgttttgggggatggagttagaaccttaatgataatttctttcgtttggtgtaggttttagagatttgttttgtggagaggtttttttcttttgatgtaataaaatttaaaatggaaatgaaaaaaaaaaaaaaaaaaaaaaa

SEQ ID NO: 25 - DNA, 890 bp, Homo sapiens
ggcggaccgaagaacgcaggaagggggccggggggacccgcccccggccggccgcagccatgaactccaacgtggagaacctacccccgcacatcatccgcctggtgtacaaggaggtgacgacactgaccgcagacccacccgatggcatcaaggtctttcccaacgaggaggacctcaccgacctccaggtcaccatcgagggccctgaggggaccccatatgctggaggtctgttccgcatgaaactcctgctggggaaggacttccctgcctccccacccaagggctacttcctgaccaagatcttccacccgaacgtgggcgccaatggcgagatctgcgtcaacgtgctcaagagggactggacggctgagctgggcatccgacacgtactgctgaccatcaagtgcctgctgatccaccctaaccccgagtctgcactcaacgaggaggcgggccgcctgctcttggagaactacgaggagtatgcggctcgggcccgtctgctcacagagatccacgggggcgccggcgggcccagcggcagggccgaagccggtcgggccctggccagtggcactgaagcttcctccaccgaccctggggccccagggggcccgggaggggctgagggtcccatggccaagaagcatgctggcgagcgcgataagaagctggcggccaagaaaaagacggacaagaagcgggcgctgcgggcgctgcggcggctgtagtgggctctcttcctccttccaccgtgaccccaacctctcctgtcccctccctccaactctgtctctaagttatttaaattatggctggggtcggggagggtacagggggcactgggacctggatttgtttttctaaataaagttggaaaagca

SEQ ID NO: 26 - DNA, 2099 bp, Homo sapiens
aagaagctgccgttgttctgggtactacagcagaagggtatgcggaagcgagcaccccagtctgagatggctcctgccggtgtgagcctgagggccaccatcctctgcctcctggcctgggctggcctggctgcaggtgaccgggtgtacatacaccccttccacctcgtcatccacaatgagagtacctgtgagcagctggcaaaggccaatgccgggaagcccaaagaccccaccttcatacctgctccaattcaggccaagacatcccctgtggatgaaaaggccctacaggaccagctggtgctagtcgctgcaaaacttgacaccgaagacaagttgagggccgcaatggtcgggatgctggccaacttcttgggcttccgtatatatggcatgcacagtgagctatggggcgtggtccatggggccaccgtcctctccccaacggctgtctttggcaccctggcctctctctatctgggagccttggaccacacagctgacaggctacaggcaatcctgggtgttccttggaaggacaagaactgcacctcccggctggatgcgcacaaggtcctgtctgccctgcaggctgtacagggcctgctagtggcccagggcagggctgatagccaggcccagctgctgctgtccacggtggtgggcgtgttcacagccccaggcctgcacctgaagcagccgtttgtgcagggcctggctctctatacccctgtggtcctcccacgctctctggacttcacagaactggatgttgctgctgagaagattgacaggttcatgcaggctgtgacaggatggaagactggctgctccctgatgggagccagtgtggacagcaccctggctttcaacacctacgtccacttccaagggaagatgaagggcttctccctgctggccgagccccaggagttctgggtggacaacagcacctcagtgtctgttcccatgctctctggcatgggcaccttccagcactggagtgacatccaggacaacttctcggtgactcaagtgcccttcactgagagcgcctgcctgctgctgatccagcctcactatgcctctgacctggacaaggtggagggtctcactttccagcaaaactccctcaactggatgaagaaactgtctccccggaccatccacctgaccatgccccaactggtgctgcaaggatcttatgacctgcaggacctgctcgcccaggctgagctgcccgccattctgcacaccgagctgaacctgcaaaaattgagcaatgaccgcatcagggtgggggaggtgctgaacagcattttttttgagcttgaagcggatgagagagagcccacagagtctacccaacagcttaacaagcctgaggtcttggaggtgaccctgaaccgcccattcctgtttgctgtgtatgatcaaagcgccactgccctgcacttcctgggccgcgtggccaacccgctgagcacagcatgaggccagggccccagaacacagtgcctggcaaggcctctgcccctggcctttgaggcaaaggccagcagcagataacaaccccggacaaatcagcgatgtgtcacccccagtctcccaccttttcttctaatgagtcgactttgagctggaaagcagccgtttctccttggtctaagtgtgctgcatggagtgagcagtagaagcctgcagcggcacaaatgcacctcccagtttgctgggtttattttagagaatgggggtggggaggcaagaaccagtgtttagcgcgggactactgttccaaaaagaattccaaccgaccagcttgtttgtgaaacaaaaaagtgttcccttttcaagttgagaacaaaaattgggttttaaaattaaagtatacatttttgcattgccttcggtttgtatttagtgtcttgaatgtaagaacatgacctccgtgtagtgtctgtaataccttagttttttccacagatgcttgtgatttttgaacaatacgtgaaagatgcaagcacctgaatttctgtttgaatgcggaacaatagctggttatttctcccttgtgttagtaataaacgtcttgccac

SEQ ID NO: 27 - DNA, 1892 bp, Homo sapiens
agggtacgggccgggaccgccgcagcccggggcgggggcacggcaaccgcgaggcctgggggcgcccgccccccgcgccccacgcccggtgccagcgagccgaggcgtgcatctccttatatggtcaaatgacacggcggggtttctcgagggcgggagctgcgcagcgctccactcggccggcagcggagccgcagccaccagccgcccgcgccctccagccccgtccgggagtccccggcccgctgcggtgccgtgagtacctccaaccccctgcgccccggagggaggccgaggggcttagccaccagggctcggaagtgggggccgaatccggtgcgagacccaaggagaggggagcagagccggagttggggagactgtggctgaaaactgtgtcttcctggagactaggctggcattttgactttgggacggagtctcgctttgtcgcccaggctggagtgcagtggcacgatctcagctcactgcaagctctacctcttggttcacgccattctcctgccccagcctcccaagtagctgggactacaggttgctgaaaagccaggagtcaaaatgactgagcgctttgactgccaccattgcaacgaatctctctttggcaagaagtacatcctgcgggaggagagcccctactgcgtggtgtgctttgagaccctgttcgccaacacctgcgaggagtgtgggaagcccatcggctgtgactgcaaggacttgtcttacaaggaccggcactggcatgaagcctgtttccactgctcgcagtgcagaaactcactggtggacaagccctttgctgccaaggaggaccagctgctctgtacagactgctattccaacgagtactcatccaagtgccaggaatgcaagaagaccatcatgccaggtacccgcaagatggagtacaagggcagcagctggcatgagacctgcttcatctgccaccgctgccagcagccaattggaaccaagagtttcatccccaaagacaatcagaatttctgtgtgccctgctatgagaaacaacatgccatgcagtgcgttcagtgcaaaaagcccatcaccacgggaggggtcacttaccgggagcagccctggcacaaggagtgcttcgtgtgcaccgcctgcaggaagcagctgtctgggcagcgcttcacagctcgcgatgactttgcctactgcctgaactgcttctgtgacttgtatgccaagaagtgtgctgggtgcaccaaccccatcagcggacttggtggcacaaaatacatctcctttgaggaacggcagtggcataacgactgctttaactgtaagaagtgctccctctcactggtggggcgtggcttcctcacagagagggacgacatcctgtgccccgactgtgggaaagacatctgaattcaacacagagaagttgctgcttgtgatctcacacacagatttttatgttttctttctcacccaggcaatcttgccttctggtttcttccagccacattgagactttcttctagtgcttttcagtgatactcacgtttgcttaaaccctttagtgctttgtgatagttcagtcccagggaaagagaaaactcgccctaggccctaggtgggaagatggtttgaaatttttgtaatcgagtaaggcacacccaaatgtaaaaatccttttgaatgatgcctttataaatctttctctcactgtctatttaagtgcaattaacatatgtcacgaacttgaaagttttctaaactcaataaggtaatgaccagttgttatttacagctctgtaacctcccgttgcgtcaagtctaaaccaagattatgtgacttgcaataaagttattcagaacagaaaaaaaaaaaaaaaaaa

SEQ ID NO: 28 - DNA, 2904 bp, Homo sapiens
ggaaactggcggtggccgcggccgccgagtcggtctgcgcatcctcctgcgttttctcgcttggatcttggcactgagaggcggtggccggcgggatggagaaaagtaggatgaacctgcccaaggggccggacacgctctgcttcgacaaggacgagttcatgaaggaagatttcgatgtcgatcattttgtgtctgactgtaggaagcgggtccagctggaagaactgagagatgacctggagctctactataaacttcttaaaacagccatggtcgaactcatcaacaaggattatgcagattttgtcaatctttcaacaaacttggttggcatggacaaagccctcaaccagctttctgtgcctttgggacaattacgagaagaggttctgagccttagatcgtctgtcagtgaaggaattcgggcagttgatgaacgaatgtctaaacaagaggacattaggaaaaaaaagatgtgtgtattgaggcttatacaagttattcggtcagttgagaaaattgaaaaaatcttaaactctcaaagttctaaagaaacctctgcactagaagcaagcagcccccttttgactggacaaattttggagagaattgccacagaatttaatcagttacagtttcatgctgttcaaagcaaaggcatgcctcttttggacaaagtaagaccgcgtatagctggcattacagccatgttacagcagtcactggaaggtctcctattagaaggccttcagacgtctgacgtcgatataatacggcactgcttgcggacttacgccacgattgacaagacacgggacgcggaggccttagttggccaagtactagtgaaaccatacatagacgaggtgattatagagcagtttgttgaatctcatcccaatggccttcaggtcatgtataataaactcctggagtttgttcctcaccattgccgccttcttcgagaagtcacaggaggtgccatctccagtgaaaaaggcaatactgttcctggatatgactttttggtgaattctgtttggccacaaatagtacaaggattagaagaaaagttaccctcgctttttaatcctgggaatcccgatgcatttcatgagaaatataccataagtatggattttgtcagaagattggaacggcagtgtggatcacaggctagtgtaaagagattaagagcccatcctgcctatcacagcttcaataagaagtggaacttgcctgtttattttcaaataagatttagagaaatagcgggatccttagaagcagcacttacagatgtcctggaagatgccccagctgaaagtccgtattgccttttggcttctcatagaacttggagcagccttaggaggtgttggtcagatgagatgttcttgccattactggtgcatcgcctgtggagactcactctgcagattttggcacgatactctgtgtttgtcaatgagctttcactcaggcccatttctaatgaaagtcccaaggagatcaagaaacctttggtaactggtagcaaagaaccttccatcacccaaggaaacactgaagaccaaggaagtggtccttcggaaacaaagcctgtggtttccatttcccgcactcagctcgtgtatgtggttgcagacctggacaagcttcaggagcagcttccagaactcttggaaataatcaagccaaaacttgaaatgattggctttaagaatttttcttctatctcagcagccctggaggactcccagagctctttttcagcctgtgtgccctccttgagtagcaagatcatccaggatttaagtgactcttgcttcggtttcctaaaaagcgccctggaggttcccaggctttaccgaagaaccaataaggaggtcccaaccacagcttcctcctatgtggacagtgctctgaagcccttattccagcttcagagcggacacaaggataagctcaaacaagcaataattcagcagtggctagaaggcactctcagtgaaagcactcataagtactatgaaaccgtgtcagatgtattaaactctgtgaagaagatggaagagagcctgaaaaggctgaaacaagccagaaaaaccactcccgccaaccccgtcggtcccagtggtggcatgagcgacgacgacaaaatcaggctgcagttggccctagatgttgagtacttgggagagcagatacaaaagttgggactacaagcaagtgacataaaaagcttctcagctctcgcagagcttgttgctgctgccaaggaccaggcaacagcagagcagccttaagcatcttggaagatcccgaggttagattcttaagcaagagaagagttggacttccaggctgaaggggagaaagtgactctgttctcttagcaaccgtctgtagcaaagaagtgcttccagcatcactccagcaacacgcccatgcgtcttctctcagcgtatttgggtcttctttgcccaaaagaacacaaaagcctttttccattgtatggaagatagtttttaagacatttgaaactttctactatagtttacagaacaaattattttatttttattgtaaatcttagtgtggaagagctgatttctaaaatatgattaaagtaaatatatacctatgaatatcaagagtcgtctccctgagcctgtagttggaagtgacgactgtaatggaatgatgtcttgtatagaaatgcccttctctgaaataaagagaactcctgggctttctaaagaggctgcgggaagccatcctccactcccactgtgtgtgagagcagtgcttctgatcctgctgtcaccccgacctctggcaggagccggcgccagtaggaaagacctccttcctaaataaaagaagtgtctcccaaaa

SEQ ID NO: 29 - DNA, 3611 bp, Homo sapiens
aaaaaaaaaaaaaagggcggccgctcgcgatctagaactagtcgtgactgggaagatggccgtctttccttggcactccaggaataggaactacaaagctgaatttgcatcatgccgactggaggctgtaccattggagtttggggactatcaccctctgaaacccataactgtcacagagtcaaagacaaagaaagtgaaccggaaaggaagcacttcttccacgtcctcctcctcctccagctccgtggtggacccgctgagcagcgtcctcgatgggactgaccccctctccatgtttgcagccactgctgaccccgcagccttggcagctgccatggacagctccagaaggaaacgtgatagagatgataactccgttgtaggatcggattttgagccttggaccaacaaacggggagaaatccttgcccggtacaccactaccgaaaagctgtctattaatctgtttatgggatctgaaaaaggcaaagctgggactgccacattggcaatgtcagagaaggtgcggacccggctggaggagctggatgactttgaggagggttcccaaaaggagctgttgaacttgactcagcaggattacgtgaaccgcatagaggagctcaaccaatcgctgaaggatgcctgggcctcagaccagaaagtgaaggctctaaaaatagtcatccagtgttcaaagcttctttcagacaccagtgttattcagttctacccaagcaaatttgtccttatcaccgacatacttgatacatttggaaagctcgtgtacgagcgcatcttttccatgtgtgtggatagccgcagcgtcttaccagatcacttttctccagagaatgcaaatgacacggccaaggaaacatgcctaaattggtttttcaagattgcctccatcagggaactcattccaagattttacgtggaggcatccatcctgaaatgtaacaaattcctctccaaaacgggaatttcagagtgcctgccccggttgacatgcatgatcagagggatcggagacccactagtgtcggtgtatgcccgtgcctacctgtgccgggtgggaatggaagtggccccacatctcaaagaaaccctaaataagaacttttttgacttcctccttacgttcaaacagattcatggggatacggtccagaaccagctggtggtccaaggagtggagctcccatcttacctccccttgtacccgcctgccatggactggatcttccagtgcatctcctaccatgcccccgaggctctgctgaccgagatgatggaaaggtgtaagaaactaggaaacaatgccttgctgttgaattctgtgatgtctgccttccgggctgagttcatcgccacaaggtctatggatttcattggcatgattaaagagtgtgatgaatctggtttccccaagcatcttctttttcgatcactgggattaaacttggccttggctgatcctcctgagagtgaccgacttcagattctcaacgaagcttggaaagtcatcactaagctgaagaacccacaggactacattaattgtgccgaagtgtgggtggaatacacctgcaagcatttcacgaaacgagaggtgaataccgttttggcagatgtcatcaagcacatgactccagatcgtgcatttgaagattcctacccccagcttcagttaataattaagaaagttattgcccacttccatgacttctcagttcttttctcagtggaaaaatttctgccgtttctggacatgttccaaaaagagagtgtgcgggtggaggtttgcaaatgcatcatggacgcctttatcaagcatcaacaagagcccaccaaggacccggtcatcttgaatgcccttttgcatgtttgcaagaccatgcatgactctgtgaatgcactcactcttgaggatgagaaaagaatgctgtcatatttgattaatggatttataaaaatggtttcctttggccgtgattttgaacaacagctgagtttttatgttgagtccaggtcgatgttttgcaatctggagcctgttcttgtgcagttgattcatagtgtgaaccggttggcaatggagacaagaaaagtaatgaaaggaaatcattccagaaagacagctgcatttgtccgggcctgtgttgcctactgcttcatcaccatcccctccctggcgggcatcttcacacgtctcaatctctacctgcattctggtcaggtggccttggccaaccagtgcctctcccaagctgatgcttttttcaaagccgctataagccttgttccggaagttccaaagatgattaatattgatgggaagatgcggccatcggaatcgttccttctggaattcctctgcaatttcttttctactttattaatagttccggatcatcctgaacatggggtcctgtttcttgttcgagagcttctcaacgtgatccaggactacacctgggaggacaacagcgatgagaaaatccgcatctacacctgcgtcctgcatctcctctccgccatgagccaggagacgtacctttaccacatagacaaagtggactccaacgacagcctctacgggggagactccaagttcctggcagaaaacaacaagctgtgtgagacggtgatggctcagatcctagagcatctgaaaaccctggccaaggacgaggccctgaagcgccagagctcgttgggcctttccttctttaacagcatcttggcccatggggacctacgcaacaacaagctcaaccagctctccgtcaacctgtggcacctggcacagaggcacggctgtgcagacaccaggaccatggtgaaaacgctagaatacatcaagaagcaaagcaaacaaccagacatgactcatctgacggagctggccctcagactccctctgcaaacaaggacctgacccccgggcccatccccaggctcagggactctggtgccaaatccagaaagatctgctctgctgccctgaactcttacggcaatttaggtttctcatttttcttttctttttacatatgtacaaattgttttaagctttggcctctatccaggttattctgacaatgaagaaatgggagttgtcagagcattaaaatgcaatcttcactaagaagcagtctctgtgttgtctttgcacaagtggccttcggtctactcagcccgatctgatgggcctttttagcaagagagaaacaagaatgcaagtaacatctttcttctctggaaggtgtttgttttttcatagtttagaaataaggactttaaaagtggactgcttttcaaagtgccactgttccagacccattccattccagactttgtaccttaaagttagagcacacccaaagtctggaactgtgttacctgaacccctatggaggatttataaaaggcagaaatagcactccattaactctttttcctatcaaaagcagctcttgattggacttagaatctgtgttggtggatcaaaggagaaagcgaggtcaaatttgagattctctgtggcttcagtatacagtaactgaataaatgtcctgaaggagaaaaaaaaaaaaaaaaaa

SEQ ID NO: 30 - DNA, 2950 bp, Homo sapiens
gcggcccgtaggaaggtgctgtccgatcgatcgggataggagcggtccctgcgcttgctgctgggaagtggtacaatcatgtttgaaattaagaagatctgttgcatcggtgcaggctatgttggaggacccacatgtagtgtcattgctcatatgtgtcctgaaatcagggtaacggttgttgatgtcaatgaatcaagaatcaatgcgtggaattctcctacacttcctatttatgagccaggactaaaagaagtggtagaatcctgtcgaggaaaaaatctttttttttctaccaatattgatgatgccatcaaagaagctgatcttgtatttatttctgtgaatactccaacaaaaacctatggaatggggaaaggccgggcagcagatctgaagtatattgaagcttgtgctagacgcattgtgcaaaactcaaatgggtacaaaattgtgactgagaaaagcacagttccagtgcgggcagcagaaagtatccgtcgcatatttgatgcaaacacaaaacccaacttgaatttacaggtgctgtccaaccctgagtttctggcagagggaacagccatcaaggacctaaagaacccagacagagtactgattggaggggatgaaactccagagggccagagagctgtgcaggccctgtgtgctgtatatgagcactgggttcccagagaaaagatcctcaccactaatacttggtcttcagagctttccaaactggcagcaaatgcttttcttgcccagagaataagcagcattaactccataagtgctctgtgtgaagcaacaggagctgatgtagaagaggtagcaacagcgattggaatggaccagagaattggaaacaagtttctaaaagccagtgttgggtttggtgggagctgtttccaaaaggatgttctgaatttggtttatctctgtgaggctctgaatttgccagaagtagctcgttattggcagcaggtcatagacatgaatgactaccagaggaggaggtttgcttcccggatcatagatagtctgtttaatacagtaactgataagaagatagctattttgggatttgcattcaaaaaggacactggtgatacaagagaatcttctagtatatatattagcaaatatttgatggatgaaggtgcacatctacatatatatgatccaaaagtacctagggaacaaatagttgtggatctttctcatccaggtgtttcagaggatgaccaagtgtcccggctcgtgaccatttccaaggatccatatgaagcatgtgatggtgcccatgctgttgttatttgcactgagtgggacatgtttaaggaattggattatgaacgcattcataaaaaaatgctaaagccagcctttatcttcgatggacggcgtgtcctggatgggctccacaatgaactacaaaccattggcttccagattgaaacaattggcaaaaaggtgtcttcaaagagaattccatatgctccttctggtgaaattccgaagtttagtcttcaagatccacctaacaagaaacctaaagtgtagagattgccatttttatttgtgatttttttttttttttggtacttcaggatagcaaatatctatctgctattaaatggtaaatgaaccaagtgtttttttttgttttttttttgagacagagtctcactgttgcccaggctggagtgcagtggtgcaatctcggctcactgcaagctctgcttcccaggttcacgccattctcctggctcagcctcccaagtagctgggactacaggcacccgccacagtgcctgggctaattttttgtatttttagtagagacagggtttcaccatgtgagccaggatggtctcaatctcctgaccttgtgaaccacccgtctcggcctcccaaagtgctgggattacaggtgtgagccaccacgcctgggcccatgaaccaagtgtttttaaggaaacaaaactatttttttaatcatcagatttatactagctatatggatattagcatatctggtaattatgaatctagaatttttttacatatttttataatactgttagctcagttattggatgagtgaaagataatcatgttggttttaatagtgtcaatttttgtaaaataaaaattaaacttcaaactctttactttataaattgtccataggccacactttaatatcacattataaagggaaggacagtcttcattcctcctggttattggtttgtttgtcattaaagatatattttgaatccatgaaattgctatgctaaacagcctttacatgtatggtctggttaaagttcctttgttccttttgttttaataaaatgtgtcactgattttttagctcaaaatcatcactgttaatttccagtcaccccaaatatggttaaaagatttttttttttaatcatgaagagaaaattagtagcatttctttctctccccattatttattggttttcctcactaatctttttttttttagtccaaaagccaaaaatatttatcttggttttacattttaatttccattcttaattgtaatttttttctttaaataaggaaaccaatataatctcatgtataaaaacttaaatattttacaagttacatatagcatcattctaaaataagaattttttttgttttctgtctgcttttttcttatgtctcttgttgagttttatattttcagtggttatttttgcttgtgttagatcattattaaaatatatccaatgtccctttgatacttgtgctctgctgagaatgtacagtttgcattaaacatcccaggtctcatccttcaggaattttgcagttcaatgagaagagggagacaaatataaagatgaggacagaagcatctctacagatgaaaattacataaataaaacattctccatcaacaaaa

SEQ ID NO: 31 - DNA, 1390 bp, Homo sapiens
gggaagtgctgttggagccgctgtggttgctgtccgcggagtggaagcgcgtgcttttgtttgtgtccctggccatggcgctgcagctctcccgggagcagggaatcaccctgcgcgggagcgccgaaatcgtggccgagttcttctcattcggcatcaacagcattttatatcagcgtggcatatatccatctgaaacctttactcgagtgcagaaatacggactcaccttgcttgtaactactgatcttgagctcataaaatacctaaataatgtggtggaacaactgaaagattggttatacaagtgttcagttcagaaactggttgtagttatctcaaatattgaaagtggtgaggtcctggaaagatggcagtttgatattgagtgtgacaagactgcaaaagatgacagtgcacccagagaaaagtctcagaaagctatccaggatgaaatccgttcagtgatcagacagatcacagctacggtgacatttctgccactgttggaagtttcttgttcatttgatctgctgatttatacagacaaagatttggttgtacctgaaaaatgggaagagtcgggaccacagtttattaccaattctgaggaagtccgccttcgttcatttactactacaatccacaaagtaaatagcatggtggcctacaaaattcctgtcaatgactgaggatgacatgaggaaaataatgtaattgtaattttgaaatgtggttttcctgaaatcaggtcatctatagttgatatgttttatttcattggttaatttttacatggagaaaaccaaaatgatacttactgaactgtgtgtaattgttcctttatttttttggtacctatttgacttaccatggagttaacatcatgaatttattgcacattgttcaaaaggaaccaggaggtttttttgtcaacattgtgatgtatattcctttgaagatagtaactgtagatggaaaaacttgtgctataaagctagatgctttcctaaatcagatgttttggtcaagtagtttgactcagtataggtagggagatatttaagtataaaatacaacaaaggaagtctaaatattcagaatctttgttaaggtcctgaaagtaactcataatctataaacaatgaaatattgctgtatagctccttttgaccttcatttcatgtatagttttccctattgaatcagtttccaattatttgactttaatttatgtaacttgaacctatgaagcaatggatatttgtactgtttaatgttctgtgatacagaactcttaaaaatgttttttcatgtgttttataaaatcaagttttaagtgaaagtgaggaaataaagttaagtttgttttaaaaaaaaaaaaaaaaaa

SEQ ID NO: 32 - DNA, 1820 bp, Homo sapiens
gagctccaagctggtttgaacaagccctgggcatgtttggcgggaagttggcttagctcggctacctgtggccccgcagttttgtagtccccgccttgtttctccccagaggcctctcaatcctccctccatgatcttcgcatagagcacagtaccccttcacacggaggacgcgatggctcccaagaaacgcccagaaacccagaagacctccgagattgtattacgccccaggaacaagaggagcaggagtcccctggagctggagcccgaggccaagaagctctgtgcgaagggctccggtcctagcagaagatgtgactcagactgcctctgggtggggctggctggcccacagatcctgccaccatgccgcagcatcgtcaggaccctccaccagcataagctgggcagagcttcctggccatctgtccagcaggggctccagcagtcctttttgcacactctggattcttaccggatattacaaaaggctgccccctttgacaggagggctacatccttggcgtggcacccaactcaccccagcaccgtggctgtgggttccaaagggggagatatcatgctctggaattttggcatcaaggacaaacccaccttcatcaaagggattggagctggagggagcatcactgggctgaagtttaaccctctcaataccaaccagttttacgcctcctcaatggagggaacaactaggctgcaagactttaaaggcaacattctacgagtttttgccagctcagacaccatcaacatctggttttgtagcctggatgtgtctgctagtagccgaatggtggtcacaggagacaacgtggggaacgtgatcctgctgaacatggacggcaaagagctttggaatctcagaatgcacaaaaagaaagtgacgcatgtggccctgaacccatgctgtgattggttcctggccacagcctccgtagatcaaacagtgaaaatttgggacctgcgccaggttagagggaaagccagcttcctctactcgctgccgcacaggcatcctgtcaacgcagcttgtttcagtcccgatggagcccggctcctgaccacggaccagaagagcgagatccgagtttactctgcttcccagtgggactgccccctgggcctgatcccgcaccctcaccgtcacttccagcacctcacacccatcaaggcagcctggcatcctcgctacaacctcattgttgtgggccgatacccagatcctaatttcaaaagttgtaccccttatgaattgaggacgatcgacgtgttcgatggaaactcagggaagatgatgtgtcagctctatgacccagaatcttctggcatcagttcgcttaatgaattcaatcccatgggggacacgctggcctctgcaatgggttaccacattctcatctggagccaggaggaagccaggacacggaagtgagagacactaaagaaggtgtgggccagacaaggccttggagcccacacatgggatcaagtcctgcaagcagaggtggtgatttgttaaagggccaaaagtatccaaggttagggttggagcaggggtgctgggacctggggcactgtgggactgggacacttttatgttaatgctctggacttgcctccagagactgctccagagttggtgacacagctgtcccaagggcccctctgtatctagcctggaaccaaggttatcttggaactaaatgacttttctcctctcagtgggtggtagcagagggatcaagcagttatttgatttgtgctcttttgatatggccaataaaaccataccg

SEQ ID NO: 33 - DNA, 4833 bp, Homo sapiens
gccatttcctcctcttgttttcactccggattctccatgttggacccaaactgaggagcccggagctgccgctgggggatcggggccgggggcacccgggggagccgctgcccgggccgcccgccctttgtacaggccgcctcccttcccggtccggggaggaaacgagaggggggatgtgaacagctgtggaagtcggagtctcgggagccggagcgggcccccgcccaggccccccagcccagcccagcccgcgcgcccgcccgtcctcccgtccagccagcccgggcccgcgggattgttagatggaacacggctccatcatcacccaggcgcggagggaagacgccctggtgctcaccaagcaaggcctggtctccaagtcctctcctaagaagcctcgtggacgtaacatcttcaaggcccttttctgctgttttcgcgcccagcatgttggccagtcaagttcctccactgagctcgctgcgtataaggaggaagcaaacaccattgctaagtcggatctgctccagtgtctccagtaccagttctaccagatcccagggacctgcctgctcccagaggtgacagaggaagatcaaggaaggatctgtgtggtcattgacctcgatgaaacccttgtgcatagctcctttaagccaatcaacaatgctgacttcatagtgcctatagagattgaggggaccactcaccaggtgtatgtgctcaagaggccttatgtggatgagttcctgagacgcatgggggaactctttgaatgtgttctcttcactgccagcctggccaagtatgccgaccctgtgacagacctgctggaccggtgtggggtgttccgggcccgcctattccgtgagtcttgcgtgttccaccagggctgctacgtcaaggacctcagccgcctggggagggacctgagaaagaccctcatcctggacaactcgcctgcttcttacatattccaccccgagaatgcagtgcctgtgcagtcctggtttgatgacatggcagacactgagttgctgaacctgatcccaatctttgaggagctgagcggagcagaggacgtctacaccagccttggggcagctgcgggccccttagcctgccctgcttccaagcgacggccatcccagtaggggactttcccacactgtgcctttacgatcagcgtgacagagtagaagctggagtgcctcaccacacggcccggaaacagcgggaagtaactggaaagagctttaggacagcttagatgccgagtgggcgaatgccagaccaatgatacccagagctacctgccgccaacttgttgagatgtgtgtttgactgtgagagagtgtgtgtttgtgtgtgtgttttgccatgaactgtggccccagtgtatagtgtttcagtgggggagaagctgaaagaccaagactcttcccaagttagcttgtctcctctcctgtcaccctaagagccactgagttgtgtagggatgaaractattgaagactccattgccaaaccatggcctttcctcagtgttgtaaggcctatgccaaggataaaggaagggtatgcctttgggtactccaggcatacacctttctgaaatccttctccagccagctgctgcagacaaaagatcacatttctgggaagatgagaacttgtttccagaccagcatccagtggccatcaggtcttgtggcccaaaggctatgcttgcctccggctgagtgcctgggataggccttttctatgtctccccaaggctggggtgctgagcctgccttcctcaccacctagccatagtctcaaacctgtggggaaggaggttttctccctgcccgggaagaggacagataactgatttccgttcttttgactgtgttttaaaattctctttctaaacacagagtgttgggcctggtttgtttctgacaaagttacagtcctgggcctgtaatgaatgtcggcggcgctggggttgcagggaaaagacaaatcctcaaagcgtggacgtgtgtccccatggcttgtggatcagctaagctcgggatcatttccataagtctgcttttcagggattctctgctggtgctggtgcaaggacttctgttccaaaggctgggaaaaactaagctgtcccagcccctcccatttcttgggcagggctcttttcctgttgtgtcttcccccagggcctgtcctgtaccgagctctgtctgttccagcctacatccttcctgggtgttgcttttcctcttaagggcctcagaactcttgctcttcctggggtgagggggaatgagtgttcttgacatgtgacagcctaatgcgcatgctttctgcctctggtaacaggagtgagtgagcccctcagacctgcactctgggtgtctcctgcttacaaaggttcttaatagtgaatgctttaaaattaaagtcatcacgaaatggaagttttcccagggtggaaaataagaggaagtgctgctgtaattgggagcacaaggggcctcccaaaaaggagccccacctcagcatcactgccttaatcgtggcctccctggggtgggtggggttctctcctccctccctccctcctcctggggtgggagggcgctcctgttcccatctctgtgttccctggaggcaggtatcacaaagcatttgtgaattgctttaggtgcagggacaccacccactcaggactcttccccatcatcccttccattgccacaccctagatccagcctcaggaactaacaagttktgagaaaagcaggtggtagagcagcagcttcgtgctctcagcggtggctggctggcatttttctctagcgttgtggtgccaccttcccttcttgtcccaaggttataaggccttgtctttctctttggaatcataaagtggaacagagtccccagaactcatgtgghcatttccgacagcatcactccccggtgcctatggggtcccggtgtacctaaagggagaaggaccccatgtgctagccagaaatatactgtctcttgaaggaaagcaggagctcagactcttagagccagctgtggcttcggacccaaggcctgacctaggctgctatcctaatattggaggaggggcctctcttccaagccccaccctaagggttagcccttggacaaatcttgtgccgtctaggcccagccaggcttttctgactaaataagcaataagaggctctaagctgactgagttgcaaggaccctttccgccctcccttggatctccatgtttctccagatggcggaagagcatgtgccaccccctttcctaacagacttgtccaagtgcttggcgtgggacccatgaccaaagcccaggatggcttggtgggagtgtccctgctgcatctgcatgaagcccctgctttttaggcctcactcccatcagaaccctgcctgcccacctgcaactcccccccaacaatgccattcccacttgccccagagaagctactcggccaaacctagccagggtctgttcttgtggaccagagccagcctagtcattatttgctgtcgggtttccagtttcaccgtgtgttagggtgagggatgattgtaaaatttgctcctcaaaggaatcaggccagactcaattttgggagggcaagacagggaggaggccgcttcatcccagactctcttctagggcttcccaccatcagcccctcccacttgagactggtctttgggaggcaataggccaccatgcctggtcagcaccaattcaagccatgccaggaatctgcctacctgccaggttcagttcttttaaggtgcctcttcagggacacagtgtgtctctctgattgggcttctaaatcaaaagcctgatgttcgtgtccctctcatagggggagctttggacacaggaccagtttggaaaagggtcaggtaagggtttccactctgcacattgtagagggaacactctgtaggcccatgggtcccttactagagaggttgagtgaatttgccttcagttaacatgggaccttctgtttagcttcctcttgcttcccaaagattttaagcattttgtaaatgtataaactcacctctggtaacagtggcccagacgctgctttgtgctaaaagcatgggaaatgtaaaggcagtctttctctgggaaatggatgctattctattctgctgcccctacctgttcctgaggcctcatttagaaagaaaatcccctcagaaggctgtctggcacccagtgtcctagccaggccaagtatatgagaaaggtaagtccattttccccttcaggtcctcagtggattacttaaccactgctgtccctcggtccctttttcctaaacgggtttagttctgtcttttttctccttttttctaaatgctggtaaatatttacattcagccagggaagaggaggccagaggtcgggccagctgccccattcttttaacgttgtagggcctgcccatggagcggaccctcctctttgggcctcgtgagcttttttgcttatcatgttccatttcgtgccgctttcccccttcaagatgccatttggagggtaggggatctgcttcccactgtgactgggctatgggattctgactaccttgcttacagattcatggtttgataaatttgttgtattccaaaacttgaaatgcaggacgccattaagtgtctgtttatatttttggaatatttgtattacttacaattaattaataaaagtgggtttaaaaaacctttccaggaaaaaaaaaaaaaaaaaaaaaaaaaaaaaaaaaaaaa

SEQ ID NO: 34 - DNA, 6030 bp, Homo sapiens
gttggcccccgttacttttcctctgggaaatatggcgcacgctgggagaacagggtacgataaccgggagatagtgatgaagtacatccattataagctgtcgcagaggggctacgagtgggatgcgggagatgtgggcgccgcgcccccgggggccgcccccgcgccgggcatcttctcctcgcagcccgggcacacgccccatacagccgcatcccgggacccggtcgccaggacctcgccgctgcagaccccggctgcccccggcgccgccgcggggcctgcgctcagcccggtgccacctgtggtccacctgaccctccgccaggccggcgacgacttctcccgccgctaccgccgcgacttcgccgagatgtccaggcagctgcacctgacgcccttcaccgcgcggggacgctttgccacggtggtggaggagctcttcagggacggggtgaactgggggaggattgtggccttctttgagttcggtggggtcatgtgtgtggagagcgtcaaccgggagatgtcgcccctggtggacaacatcgccctgtggatgactgagtacctgaaccggcacctgcacacctggatccaggataacggaggctgggatgcctttgtggaactgtacggccccagcatgcggcctctgtttgatttctcctggctgtctctgaagactctgctcagtttggccctggtgggagcttgcatcaccctgggtgcctatctgggccacaagtgaagtcaacatgcctgccccaaacaaatatgcaaaaggttcactaaagcagtagaaataatatgcattgtcagtgatgttccatgaaacaaagctgcaggctgtttaagaaaaaataacacacatataaacatcacacacacagacagacacacacacacacaacaattaacagtcttcaggcaaaacgtcgaatcagctatttactgccaaagggaaatatcatttattttttacattattaagaaaaaaagatttatttatttaagacagtcccatcaaaactcctgtctttggaaatccgaccactaattgccaagcaccgcttcgtgtggctccacctggatgttctgtgcctgtaaacatagattcgctttccatgttgttggccggatcaccatctgaagagcagacggatggaaaaaggacctgatcattggggaagctggctttctggctgctggaggctggggagaaggtgttcattcacttgcatttctttgccctgggggctgtgatattaacagagggagggttcctgtggggggaagtccatgcctccctggcctgaagaagagactctttgcatatgactcacatgatgcatacctggtgggaggaaaagagttgggaacttcagatggacctagtacccactgagatttccacgccgaaggacagcgatgggaaaaatgcccttaaatcataggaaagtatttttttaagctaccaattgtgccgagaaaagcattttagcaatttatacaatatcatccagtaccttaagccctgattgtgtatattcatatattttggatacgcaccccccaactcccaatactggctctgtctgagtaagaaacagaatcctctggaacttgaggaagtgaacatttcggtgacttccgcatcaggaaggctagagttacccagagcatcaggccgccacaagtgcctgcttttaggagaccgaagtccgcagaacctgcctgtgtcccagcttggaggcctggtcctggaactgagccggggccctcactggcctcctccagggatgatcaacagggcagtgtggtctccgaatgtctggaagctgatggagctcagaattccactgtcaagaaagagcagtagaggggtgtggctgggcctgtcaccctggggccctccaggtaggcccgttttcacgtggagcatgggagccacgacccttcttaagacatgtatcactgtagagggaaggaacagaggccctgggcccttcctatcagaaggacatggtgaaggctgggaacgtgaggagaggcaatggccacggcccattttggctgtagcacatggcacgttggctgtgtggccttggcccacctgtgagtttaaagcaaggctttaaatgactttggagagggtcacaaatcctaaaagaagcattgaagtgaggtgtcatggattaattgacccctgtctatggaattacatgtaaaacattatcttgtcactgtagtttggttttatttgaaaacctgacaaaaaaaaagttccaggtgtggaatatgggggttatctgtacatcctggggcattaaaaaaaaaatcaatggtggggaactataaagaagtaacaaaagaagtgacatcttcagcaaataaactaggaaatttttttttcttccagtttagaatcagccttgaaacattgatggaataactctgtggcattattgcattatataccatttatctgtattaactttggaatgtactctgttcaatgtttaatgctgtggttgatatttcgaaagctgctttaaaaaaatacatgcatctcagcgtttttttgtttttaattgtatttagttatggcctatacactatttgtgagcaaaggtgatcgttttctgtttgagatttttatctcttgattcttcaaaagcattctgagaaggtgagataagccctgagtctcagctacctaagaaaaacctggatgtcactggccactgaggagctttgtttcaaccaagtcatgtgcatttccacgtcaacagaattgtttattgtgacagttatatctgttgtccctttgaccttgtttcttgaaggtttcctcgtccctgggcaattccgcatttaattcatggtattcaggattacatgcatgtttggttaaacccatgagattcattcagttaaaaatccagatggcaaatgaccagcagattcaaatctatggtggtttgacctttagagagttgctttacgtggcctgtttcaacacagacccacccagagccctcctgccctccttccgcgggggctttctcatggctgtccttcagggtcttcctgaaatgcagtggtgcttacgctccaccaagaaagcaggaaacctgtggtatgaagccagacctccccggcgggcctcagggaacagaatgatcagacctttgaatgattctaatttttaagcaaaatattattttatgaaaggtttacattgtcaaagtgatgaatatggaatatccaatcctgtgctgctatcctgccaaaatcattttaatggagtcagtttgcagtatgctccacgtggtaagatcctccaagctgctttagaagtaacaatgaagaacgtggacgcttttaatataaagcctgttttgtcttctgttgttgttcaaacgggattcacagagtatttgaaaaatgtatatatattaagaggtcacgggggctaattgctggctggctgccttttgctgtggggttttgttacctggttttaataacagtaaatgtgcccagcctcttggccccagaactgtacagtattgtggctgcacttgctctaagagtagttgatgttgcattttccttattgttaaaaacatgttagaagcaatgaatgtatataaaagcctcaactagtcatttttttctcctcttcttttttttcattatatctaattattttgcagttgggcaacagagaaccatccctattttgtattgaagagggattcacatctgcatcttaactgctctttatgaatgaaaaaacagtcctctgtatgtactcctctttacactggccagggtcagagttaaatagagtatatgcactttccaaattggggacaagggctctaaaaaaagccccaaaaggagaagaacatctgagaacctcctcggccctcccagtccctcgctgcacaaatactccgcaagagaggccagaatgacagctgacagggtctatggccatcgggtcgtctccgaagatttggcaggggcagaaaactctggcaggcttaagatttggaataaagtcacagaatcaaggaagcacctcaatttagttcaaacaagacgccaacattctctccacagctcacttacctctctgtgttcagatgtggccttccatttatatgtgatctttgttttattagtaaatgcttatcatctaaagatgtagctctggcccagtgggaaaaattaggaagtgattataaatcgagaggagttataataatcaagattaaatgtaaataatcagggcaatcccaacacatgtctagctttcacctccaggatctattgagtgaacagaattgcaaatagtctctatttgtaattgaacttatcctaaaacaaatagtttataaatgtgaacttaaactctaattaattccaactgtacttttaaggcagtggctgtttttagactttcttatcacttatagttagtaatgtacacctactctatcagagaaaaacaggaaaggctcgaaatacaagccattctaaggaaattagggagtcagttgaaattctattctgatcttattctgtggtgtcttttgcagcccagacaaatgtggttacacactttttaagaaatacaattctacattgtcaagcttatgaaggttccaatcagatctttattgttattcaatttggatctttcagggattttttttttaaattattatgggacaaaggacatttgttggaggggtgggagggaggaacaatttttaaatataaaacattcccaagtttggatcagggagttggaagttttcagaataaccagaactaagggtatgaaggacctgtattggggtcgatgtgatgcctctgcgaagaaccttgtgtgacaaatgagaaacattttgaagtttgtggtacgacctttagattccagagacatcagcatggctcaaagtgcagctccgtttggcagtgcaatggtataaatttcaagctggatatgtctaatgggtatttaaacaataaatgtgcagttttaactaacaggatatttaatgacaaccttctggttggtagggacatctgtttctaaatgtttattatgtacaatacagaaaaaaattttataaaattaagcaatgtgaaactgaattggagagtgataatacaagtcctttagtcttacccagtgaatcattctgttccatgtctttggacaaccatgaccttggacaatcatgaaatatgcatctcactggatgcaaagaaaatcagatggagcatgaatggtactgtaccggttcatctggactgccccagaaaaataacttcaagcaaacatcctatcaacaacaaggttgttctgcataccaagctgagcacagaagatgggaacactggtggaggatggaaaggctcgctcaatcaagaaaattctgagactattaataaataagactgtagtgtagatactgagtaaatccatgcacctaaaccttttggaaaatctgccgtgggccctccagatagctcatttcattaagtttttccctccaaggtagaatttgcaagagtgacagtggattgcatttcttttggggaagctttcttttggtggttttgtttattataccttcttaagttttcaaccaaggtttgcttttgttttgagttactggggttatttttgttttaaataaaaataagtgtacaataagtgtttttgtattgaaagcttttgttatcaagattttcatacttttaccttccatggctctttttaagattgatacttttaagaggtggctgatattctgcaacactgtacacataaaaaatacggtaaggatactttacatggttaaggtaaagtaagtctccagttggccaccattagctataatggcactttgtttgtgttgttggaaaaagtcacattgccattaaactttccttgtctgtctagttaatattgtgaagaaaaataaagtacagtgtgagatactg

SEQ ID NO: 35 - DNA, 5189 bp, Homo sapiens
ggactgcgaaaggagcagggttgcggagctagggctccagcctgcggccgcgcattcttgcgtctggccagccgcgagctctaagggtcggccccgcccggtccgcccccgcggctccctgccaggctctcgcgggcgcgctcggggtggggcctcgcggctggcggagatgcggccggggctgcgcggtggtgatgcgagcctgctgggcggcgcgccggggcagccggagccgcgcgccgcggcgctgtaatcggacaccaagagcgctcgcccccggcctccggccactttccattcactccgaggtgcttgattgagcgacgcggagaagagctccgggtgccgcggcactgcagcgctgagattcctttacaaagaaactcagaggaccgggaagaaagaatttcacctttgcgacgtgctagaaaataaggtcgtctgggaaaaggactggagacacaagcgcatccaaccccggtagcaaactgatgacttttccgtgctgatttctttcaacctcggtattttcccttggatattaacttgcatatctgaagaaatggcattccggacaatttgcgtgttggttggagtatttatttgttctatctgtgtgaaaggatcttcccagccccaagcaagagtttatttaacatttgatgaacttcgagaaaccaagacctctgaatacttcagcctttcccaccatcctttagactacaggattttattaatggatgaagatcaggaccggatatatgtgggaagcaaagatcacattctttccctgaatattaacaatataagtcaagaagctttgagtgttttctggccagcatctacaatcaaagttgaagaatgcaaaatggctggcaaagatcccacacacggctgtgggaactttgtccgtgtaattcagactttcaatcgcacacatttgtatgtctgtgggagtggcgctttcagtcctgtctgtacttacttgaacagagggaggagatcagaggaccaagttttcatgattgactccaagtgtgaatctggaaaaggacgctgctctttcaaccccaacgtgaacacggtgtctgttatgatcaatgaggagcttttctctggaatgtatatagatttcatggggacagatgctgctatttttcgaagtttaaccaagaggaatgcggtcagaactgatcaacataattccaaatggctaagtgaacctatgtttgtagatgcacatgtcatcccagatggtactgatccaaatgatgctaaggtgtacttcttcttcaaagaaaaactgactgacaataacaggagcacgaaacagattcattccatgattgctcgaatatgtcctaatgacactggtggactgcgtagccttgtcaacaagtggaccactttcttaaaggcgaggctggtgtgctcggtaacagatgaagacggcccagaaacacactttgatgaattagaggatgtgtttctgctggaaactgataacccgaggacaacactagtgtatggcatttttacaacatcaagctcagttttcaaaggatcagccgtgtgtgtgtatcatttatctgatatacagactgtgtttaatgggccttttgcccacaaagaagggcccaatcatcagctgatttcctatcagggcagaattccatatcctcgccctggaacttgtccaggaggagcatttacacccaatatgcgaaccaccaaggagttcccagatgatgttgtcacttttattcggaaccatcctctcatgtacaattccatctacccaatccacaaaaggcctttgattgttcgtattggcactgactacaagtatacaaagatagctgtggatcgagtgaacgctgctgatgggagataccatgtcctgtttctcggaacagatcggggtactgtgcaaaaagtggttgttcttcctactaacaactctgtcagtggcgagctcattctggaggagctggaagtctttaagaatcatgctcctataacaacaatgaaaatttcatctaaaaagcaacagttgtatgtgagttccaatgaaggggtttcccaggtatctctgcaccgctgccacatctatggtacagcctgtgctgactgctgcctggcgcgggacccttattgcgcctgggatggccattcctgttccagattctacccaactgggaaacggaggagccgaagacaagatgtgagacatggaaacccactgactcaatgcagaggatttaatctaaaagcatacagaaatgcagctgaaattgtgcagtatggagtaaaaaataacaccacttttctggagtgtgcccccaagtctccgcaggcatctatcaagtggctgttacagaaagacaaagacaggaggaaagaggttaagctgaatgaacgaataatagccacttcacagggactcctgatccgctctgttcagggttctgaccaaggactttatcactgcattgctacagaaaatagtttcaagcagaccatagccaagatcaacttcaaagttttagattcagaaatggtggctgttgtgacggacaaatggtccccatggacctgggccagctctgtgagggctttacccttccacccgaaggacatcatgggggcattcagccactcagaaatgcagatgattaaccaatattgcaaagacactcggcagcaacatcagcagggagatgaatcacagaaaatgagaggggactatggcaagttaaaggccctcatcaatagtcggaaaagtagaaacaggaggaatcagttgccagagtcataatattttcttatgtgggtcttatgcttccattaacaaatgctctgtcttcaatgatcaaattttgagcaaagaaacttgtgctttaccaaggggaattactgaaaaaggtgattactcctgaagtgagttttacacgaactgaaatgagcatgcattttcttgtatgatagtgactagcactagacatgtcatggtcctcatggtgcatataaatatatttaacttaacccagattttatttatatctttattcaccttttcttcaaaatcgatatggtggctgcaaaactagaattgttgcatccctcaattgaatgagggccatatccctgtggtattcctttcctgctttggggctttagaattctaattgtcagtgattttgtatatgaaaacaagttccaaatccacagcttttacgtagtaaaagtcataaatgcatatgacagaatggctatcaaaagaaatagaaaaggaagacggcatttaaagttgtataaaaacacgagttattcataaagagaaaatgatgagtttttatggttccaatgaaatatgttggggtttttttaagattgtaaaaataatcagttactggtatctgtcactgacctttgtttccttattcaggaagataaaaatcagtaacctaccccatgaagatatttggtgggagttatatcagtgaagcagtttggtttatattcttatgttatcaccttccaaacaaaagcacttactttttttggaagttatttattttagactcaaagaatataatcttgcactactcagttattactgtttgttctcttattccctagtctgtgtggcaaattaaacaatataagaaggaaaaatttgaagtattagacttctaaataaggggtgaaatcatcagaaagaaaaatcaaagtagaaactactaattttttaagaggaatttataacaaatatggctagttttcaacttcagtactcaaattcaatgattcttccttttattaaaaccagtctcagatatcatactgatttttaagtcaacactatatattttatgatcttttcagtgtgatggcaaggtgcttgttatgtctagaaagtaagaaaacaatatgaggagacattctgtctttcaaaaggtaatggtacatacgttcactggtctctaagtgtaaaagtagtaaattttgtgatgaataaaataattatctcctaattgtatgttagaataattttattagaataatttcatactgaaattattttctccaaataaaaattagatggaaaaatgtgaaaaaaattattcatgctctcatatatattttaaaaacactacttttgcttttttatttaccttttaagacattttcatgcttccaggtaaaaacagatattgtaccatgtacctaatccaaatatcatataaacattttatttatagttaataatctatgatgaaggtaattaaagtagattatggcctttttaagtattgcagtctaaaacttcaaaaactaaaatcattgtcaaaattaatatgattattaatcagaatatcagaatatgattcactatttaaactatgataaattatgataatatatgaggaggcctcgctatagcaaaaatagttaaaatgctgacataacaccaaacttcattttttaaaaaatctgttgttccaaatgtgtataattttaaagtaatttctaaagcagtttattataatggtttgcctgcttaaaaggtataattaaacttcttttctcttctacattgacacacagaaatgtgtcaatgtaaagccaaaaccatcttctgtgtttatggccaatctattctcaaagttaaaagtaaaattgtttcagagtcacagttccctttatttcacataagcccaaactgatagacagtaacggtgtttagttttatactatatttgtgctatttaattctttctattttcacaattattaaattgtgtacactttcattacttttaaaaatgtagaaattcttcatgaacataactctgctgaatgtaaaagaaaattttttttcaaaaatgctgttaatgtatactactggtggttgattggttttattttatgtagcttgacaattcagtgacttaatatctattccatttgtattgtacataaaattttctagaaatacacttttttccaaagtgtaagtttgtgaatagattttagcatgatgaaactgtcataatggtgaatgttcaatctgtgtaagaaaacaaactaaatgtagttgtcacactaaaatttaattggatattgatgaaatcattggcctggcaaaataaaacatgttgaattccccaaaaaaaaaaaaaaaa

SEQ ID NO: 36 - DNA, 2360 bp, Homo sapiens
gctacgcgggccacgctgctggctggcctgacctaggcgcgcggggtcgggcggccgcgcgggcgggctgagtgagcaagacaagacactcaagaagagcgagctgcgcctgggtcccggccaggcttgcacgcagaggcgggcggcagacggtgcccggcggaatctcctgagctccgccgcccagctctggtgccagcgcccagtggccgccgcttcgaaagtgactggtgcctcgccgcctcctctcggtgcgggaccatgaagctgctgccgtcggtggtgctgaagctctttctggctgcagttctctcggcactggtgactggcgagagcctggagcggcttcggagagggctagctgctggaaccagcaacccggaccctcccactgtatccacggaccagctgctacccctaggaggcggccgggaccggaaagtccgtgacttgcaagaggcagatctggaccttttgagagtcactttatcctccaagccacaagcactggccacaccaaacaaggaggagcacgggaaaagaaagaagaaaggcaaggggctagggaagaagagggacccatgtcttcggaaatacaaggacttctgcatccatggagaatgcaaatatgtgaaggagctccgggctccctcctgcatctgccacccgggttaccatggagagaggtgtcatgggctgagcctcccagtggaaaatcgcttatatacctatgaccacacaaccatcctggccgtggtggctgtggtgctgtcatctgtctgtctgctggtcatcgtggggcttctcatgtttaggtaccataggagaggaggttatgatgtggaaaatgaagagaaagtgaagttgggcatgactaattcccactgagagagacttgtgctcaaggaatcggctggggactgctacctctgagaagacacaaggtgatttcagactgcagaggggaaagacttccatctagtcacaaagactccttcgtccccagttgccgtctaggattgggcctcccataattgctttgccaaaataccagagccttcaagtgccaaacagagtatgtccgatggtatctgggtaagaagaaagcaaaagcaagggaccttcatgcccttctgattcccctccaccaaaccccacttcccctcataagtttgtttaaacacttatcttctggattagaatgccggttaaattccatatgctccaggatctttgactgaaaaaaaaaaagaagaagaagaaggagagcaagaaggaaagatttgtgaactggaagaaagcaacaaagattgagaagccatgtactcaagtaccaccaagggatctgccattgggaccctccagtgctggatttgatgagttaactgtgaaataccacaagcctgagaactgaattttgggacttctacccagatggaaaaataacaactatttttgttgttgttgtttgtaaatgcctcttaaattatatatttattttattctatgtatgttaatttatttagtttttaacaatctaacaataatatttcaagtgcctagactgttactttggcaatttcctggccctccactcctcatccccacaatctggcttagtgccacccacctttgccacaaagctaggatggttctgtgacccatctgtagtaatttattgtctgtctacatttctgcagatcttccgtggtcagagtgccactgcgggagctctgtatggtcaggatgtaggggttaacttggtcagagccactctatgagttggacttcagtcttgcctaggcgattttgtctaccatttgtgttttgaaagcccaaggtgctgatgtcaaagtgtaacagatatcagtgtctccccgtgtcctctccctgccaagtctcagaagaggttgggcttccatgcctgtagctttcctggtccctcacccccatggccccaggccacagcgtgggaactcactttcccttgtgtcaagacatttctctaactcctgccattcttctggtgctactccatgcaggggtcagtgcagcagaggacagtctggagaaggtattagcaaagcaaaaggctgagaaggaacagggaacattggagctgactgttcttggtaactgattacctgccaattgctaccgagaaggttggaggtggggaaggctttgtataatcccacccacctcaccaaaacgatgaaggtatgctgtcatggtcctttctggaagtttctggtgccatttctgaactgttacaacttgtatttccaaacctggttcatatttatactttgcaatccaaataaagataacccttattccataaaaaaaaaaaaaaaaaa

SEQ ID NO: 37 - DNA, 4163 bp, Homo sapiens
ttgatttggtatagtgggaacatttgctttggagacagatgaactggattctgatcgtgaccctgctattttctccttgtgtgactttggagccatgagaccccagatcctgctgctcctggccctgctgaccctaggcctggctgcacaacaccaagacaaagtgccctgtaagatggtggacaagaaggtctcgtgccaggttctgggcctgctccaggtcccctcggtgctcccgccagacactgagacccttgatctatctgggaaccagctgcggagtatcctggcctcacccctgggcttctacacggcacttcgtcacctggacctgagcaccaatgagatcagcttcctccagccaggagccttccaggccctgacccacctggagcacctcagcctggctcacaaccggctggcgatggccactgcgctgagtgctggtggcctgggccccctgccacgcgtgacctccctggacctgtctgggaacagcctgtacagcggcctgctggagcggctgctgggggaggcacccagcctgcataccctctcactggcggagaacagtctgactcgcctcacccgccacaccttccgggacatgcctgcgctggagcagcttgacctgcatagcaacgtgctgatggacatcgaggatggcgccttcgagggcctgccccgcctgacccatctcaacctctccaggaattccctcacctgcatctccgacttcagcctccagcagctgcgggtgctagacctgagctgcaacagcatcgaggcctttcagacggcctcccagccccaggctgagttccagctcacctggcttgacctgcgggagaacaaactgctccatttccccgacctggccgcgctcccgagactcatctacctgaacttgtccaacaacctcatccggctccccacagggccaccccaggacagcaagggcatccacgcaccttccgagggctggtcagccctgcccctctcagcccccagcgggaatgccagcggccgccccctttcccagctcttgaatctggatttgagctacaatgagattgagctcatccccgacagctttcttgagcacctgacctccctgtgcttcctgaacctcagcagaaactgcttgcggacctttgaggcccggcgcttaggctccctgccctgcctgatgctccttgacttaagccacaatgccctggagacactggaactgggcgccagagccctggggtctctgcggacgctgctcctacagggcaatgccctgcgggacctgcccccatacacctttgccaatctggccagcctgcagcggctcaacctgcaggggaaccgagtcagcccctgtggggggccagatgagcctggcccctccggctgtgtggccttctccggcatcacctccctccgcagcctgagcctggtggataatgagatagagctgctcagggcaggggccttcctccacaccccactgactgagctggacctttcttccaatcctgggctggaggtggccacgggggccttgggaggcctggaggcctccttggaggtcctggcactgcagggcaacgggctgatggtcctgcaggtggacctgccctgcttcatctgcctcaagcggctcaatcttgccgagaaccgcctgagccaccttcccgcctggacacaggctgtgtcactggaggtgctggacctgcgaaacaacagcttcagcctcctgccaggcagtgccatgggtggcctggagaccagcctccggcgcctctacctgcaggggaatccactcagctgctgcggcaatggctggctggcagcccagctgcaccagggccgtgtggacgtggacgccacccaggacctgatctgccgcttcagctcccaggaggaggtgtccctgagccacgtgcgtcccgaggactgtgagaaggggggactgaagaacatcaacctcatcatcatcctcaccttcatactggtctctgccatcctcctcaccacgctggccgcctgctgctgcgtccgccggcagaagtttaaccaacagtataaagcctaaagaagccgggagacactctaggtcagtgggggagcctgaggtacagagaagagtgaggactgactcaaggtcacacagtgatccggatcccagaactctggtctccaaattacagcccaggacacctttctctgccgcctgctgcatcagtgggtgacccccttcccgggctgcactttgggtccagctgtggaagccagaagttgggcggtttcagggacagccgagaataatgttgacctgtcagatcaacaaatcttcactgagcatgtattttgtgccacaccctgctctgggcactgggaatgctgggaaatgagatacattcccgccctcaagaatctcccagtctggtaggagagagtgctgcagagccacgtggccgccacgcagtgtgcttagggcctgaggtgtgaaagcccagggctccagagctcggcaggccccgctggtttggtgcggtgagtcctgccccggctgtgcagggtgagggagggccaagccaggaggatttgtctgagacatttccaagcagactgtttgtcacgtcttctgagaatgactttcagtctctctgaaaatgaaaagcttaggaccggaagagagaattggagctgtacgagtgtgtctcggatctggtattgttaggtgggccacggcggctccagcagggtctggttaaggggtccagcccagcactggaccattccgtctcctgctctggacttgccctctcccttcctggcactctcatgttgcataccctgaccccagtgctgctctaagcaccgtccctgcccagccccacttctccatcgcagccccaccttggctgctgagccaggagctaaaaccttagatatctggttctgttttgcacccagcttggcagatgtggatttgaatccaagccttgtgtctgcccctatgtgacagctctatattttatccccgttttataaaagaggaaactgaagttctgaaaatctccttccagggccccagctaactaatgccataggtgagattcaaaccttcatccttctgtctccagggcctgatctttaccactgcaggggctgcaggccgttaagtggacaggaagtggccccacatagcccgagcagggtctggaagcatcctgtgctgtgcacacctgctctctcctctctcccaggcaggcagctgcaggcgctctcctccttctctgcctgtttccctcctcccttcctttccaccctggtgtgggttctcctgttctctctgtgctcttgcattctctcattcccttttcctctatggagcagagcctggagtttgagactatggaatccaacctccccattgcacagatggggaaactgaggcttaggaagagaatgaaacttgtggagagcttatacagaacctctgggggaaaaaagagcccttatttgtggggtgagattgggggttggaccagagtgatgtcctctctcagctatcacatcacaagataatgctggctccaaacttcctttctgtgcctcatcatgcaaggatcttttttccctcttacaaaaacaggtaaaaagcctcacccagatgacccccatccctcataccatggagtcatgagctgtctgggaagaatggacgtgctgggaccaactcaagaccttgttttgctgtcttcatcatcttacctgtgcttggcccacagtctggctcatgatgtgggctcagtaatgtgcgagaaagtgaaaatgccactctctccaccccattttacagaggagaacaccaaggcccagaggaagttaagggagagtcaatgggcagagccagggctaggccctggtggtgtgtggagcacccaggcagacccagtcctggttgggatcacacccacgggtgctactgcacgtaacactcctccttaggcctggaggccaaggtgtgggtccccacgcctgatctttgaaaacactacacagggctgctgtcacttcccagggcccaggcctcagcccaggcctcgggaccaactctttgtataacctacctgaatgtattaaaaactaattttggaaaaaaaaaa

SEQ ID NO: 38 - DNA, 4548 bp, Homo sapiens
gaattccgggagcccgcggaggctgctgcagcagcccgaaccggcgtccgagtccggggaaggcccccgcgagcgcagggaggggccggaaagttccggcgaactgggggagcggcagtgggagagcgtcgggcgggaggcggtggtcctgggagcggccccggcgcccgaagccgccccgagctggtggggagggtcccggccggtggggccgggctggcgggggaggggcgcctgggggtgcaagaggcgaattggctgcccggggtgcaggagggacaggtggtgcgggctgtcaggaaacctacctgaacgggaaggagccccaggagggagagggacccggcgagggctcaggacccggaggcgccggcggaggaggaggtggtgactggcaggcccgggccccacggtacctccggggctgaaggggacgcaggatgtaggggcatggggagtcgggcgcagaagagtgcggggaacgctgagctctgggagccactgcctgagggcaggccgcggccggcgggaacctcttctgccgtctcagcctgggcgtcgctgaagctgtgtctgcggggaggcagcggaaggcggcagaggctgggaggcggcagaatgcagccagaggagggcacaggctggctgctggagctgctgtccgaggtgcagctgcaacagtacttcctgcggctccgagatgacctcaacgtcacccgcctgtcccactttgagtacgtcaagaatgaggacctggagaagatcggcatgggtcggcctggccagcggcggctgtgggaggctgtgaagaggaggaaggccttgtgcaaacgcaagtcgtggatgagtaaggtgttcagtggaaagcgactggaggctgagttcccacctcatcactctcagagcaccttccggaagacctcgcccgcccctgggggcccagcaggggaggggcccctgcagagcctcacctgcctcattggggagaaggacctgcgcctcctggagaagctgggtgatggttcctttggcgtggtgcgcaggggcgagtgggacgcgccctcagggaagacggtgagtgtggctgtgaagtgcctgaagcccgatgtcctgagccagccagaagccatggacgacttcatccgggaggtcaatgccatgcactcgctcgaccaccgaaacctcatccgcctctacggggtggtgctcacgccgcccatgaagatggtgacagagctggcacctctgggatcgttgttggaccggctacgtaagcaccagggccacttcctcctggggactctgagccgctacgctgtgcaggtggctgagggcatgggctacctggagtccaagcgctttattcaccgtgacctggctgcccgcaatctgctgttggctacccgcgacctggtcaagatcggggactttgggctgatgcgagcactacctcagaatgacgaccattacgtcatgcaggaacatcgcaaggtgcccttcgcctggtgtgcccccgagagcctgaagacacgcaccttctcccatgccagcgacacctggatgttcggggtgacactgtgggaaatgttcacctacggccaggagccctggatcggcctcaacggcagtcagatcctgcataagatcgacaaggagggggagcggctgccccggcccgaggactgtccccaggacatctacaacgtcatggtccagtgctgggctcacaagccagaggacagacccacgtttgtggccctgcgggacttcctgctggaggcccagcccacagacatgcgggcccttcaggactttgaggaaccggacaagctgcacatccagatgaatgatgtcatcaccgtcatcgagggaagggccgagaactactggtggcgtggccagaacacacggacgctgtgtgtggggcccttccctcgcaacgtggtgacctccgtggccggcctgtcggcccaggacatcagccagcccctgcagaacagcttcatccacacagggcatggcgacagtgacccccgccactgctggggcttcccggacaggattgacgaactgtatctgggaaaccccatggacccccccgacctcctgagcgtggaactgagcacctcccggcccccccagcatctaggaggggtgaaaaaaccaacctatgaccctgtgagcgaggaccaagaccccttgtccagcgacttcaagaggctgggcctgcggaagccaggcctgccccgagggctgtggctggcgaagccctcggcgcgggtgccgggcaccaaggccagccgaggcagcggggctgaggtcacgctcatcgacttcggtgaggagcccgtggtcccggccctacggccctgcccgccctccctggcgcagctggccatggacgcctgctccctgctggacgagaccccgcctcagagccccacgcgggcactgccccggcccctgcaccccacgcctgtggtggactgggacgcacgcccgctgccccccccgcccgcctatgacgacgtggcccaggatgaggatgactttgagatctgctccatcaacagcaccctcgtgggcgcgggggtccctgccgggcccagccagggccagaccaactacgcctttgtgcctgagcaggcgcggccgccccctcccctggaggacaacctgttcctcccgccccagggtgggggcaagccgcccagctccgcacagaccgcagagatcttccaggcgctacagcaggagtgcatgaggcaactgcaggctccgggctccccggccccctctcccagcccggggggtgacgacaagccccaggtgcctcctcgggtacccatcccccctcggcccacgcgcccacacgtccagctgtctccagcccccccgggcgaggaggagaccagccagtggcctggacctgcttcccctccccgggtgcctccgcgggagcccctgtcccctcaaggctcgaggacacccagccccctggtaccacctggcagctccccgctgccaccccggctctcaagctcacctgggaagaccatgcccaccacccagagctttgcctcagaccccaagtacgccaccccccaggtgatccaggcccctggcgcgggtggtccctgcatcctgcccatcgtccgggatggcaagaaggtcagcagcacccactattacttgctgcccgagcgaccatcctacctggagcgctaccagcgcttcctgcgtgaggcccagagccccgaggagcctacccccctgcctgtgcctctgctgctgcccccacccagcaccccagcccccgccgcccccacggccaccgtgcggccgatgccccaggctgccttggaccccaaggccaacttctccaccaacaacagcaacccaggggcccggccaccacccccgagggccactgctcggctgccacagaggggctgccctggcgatgggccagaggcgggccggccagcagacaagatccagatggccatggtgcatggggtgaccacagaggagtgccaggcggccctgcagtgccacggctggagcgtgcagagggctgcccagtatctgaaggtggagcagctcttcgggctgggtctgcggcccagaggggagtgccacaaagtgctggagatgttcgactggaacctggagcaggccggctgccaccttctgggctcctggggccctgcccaccacaagcgctgagatgcgtctggagagccagagggcctgcctgaaggaatcacctgagcctgtccgtccaccaggagtggggagatgcccccatccagtcctggaggacccgctgctcctgctgctcccggggatggagcaaggccaaggctgcgggaggctgggagccctgccctgcccatccctcccgcaccagtgctgtccctgcacactttggttcagtcccggtgcccctgccaagatgtggaaggggccgggtgaagacaggcttgagggccgccccagcaggctctgggtatgacctgcctctggccctggtcctgggcggggcctgtgggtggagtagtacccccaggccctgccctgggtgacagactgggaggaaaccaggctggacctgggcaggcgggatgtgttggccacagggagaggcggaccggcacccggtgggacctcctaggactgggccttcttccagggggcccctggcagcagctggggtgtcgggcagaatgtgacttgtggccttaccatggacttgaatgggacttggctggcctcaggatcttgtgcctggaaatagcctgaggtggctcaggaagcggagaaagggtgccagaccattctctggcggggaccagggcccaaggccagggctggaaggagaccaaggggcagcccctggaggacatcagtgcttcctcttccacccaattcccccacgcggttccatgttttcccaccagcctgttgggcgaagttgctgctccggcattcagtcctgcttcttccagagaaataaagttagtttctattttatgttaaaaaaaa

SEQ ID NO: 39 - DNA, 2687 bp, Homo sapiens
acggcgcgctgggctcacactgtcccgccgcggacgggctttgtggttgggggcgcgcgtgcgagtgccagtgagagtgtgggtgcgcgctgtgggccgcggcgcgggtgggtggccgtgcgttcttgcgagccggcctgcaggaggcgaggctcccctggcctcccgcacccagcggcggaccgagcccctggagggaagttgccgcagccgcccgggccgccggccctcctgtcccgcgccaggtacacagcttctcctagcatgacttcgatctgatcagcaaacaagaaaatttgtctcccgtagttctggggcgtgttcaccacctacaaccacagagctgtcatggctgccatctctacttccatccctgtaatttcacagccccagttcacagccatgaatgaaccacagtgcttctacaacgagtccattgccttcttttataaccgaagtggaaagcatcttgccacagaatggaacacagtcagcaagctggtgatgggacttggaatcactgtttgtatcttcatcatgttggccaacctattggtcatggtggcaatctatgtcaaccgccgcttccattttcctatttattacctaatggctaatctggctgctgcagacttctttgctgggttggcctacttctatctcatgttcaacacaggacccaatactcggagactgactgttagcacatggctcctgcgtcagggcctcattgacaccagcctgacggcatctgtggccaacttactggctattgcaatcgagaggcacattacggttttccgcatgcagctccacacacggatgagcaaccggcgggtagtggtggtcattgtggtcatctggactatggccatcgttatgggtgctatacccagtgtgggctggaactgtatctgtgatattgaaaattgttccaacatggcacccctctacagtgactcttacttagtcttctgggccattttcaacttggtgacctttgtggtaatggtggttctctatgctcacatctttggctatgttcgccagaggactatgagaatgtctcggcatagttctggaccccggcggaatcgggataccatgatgagtcttctgaagactgtggtcattgtgcttggggcctttatcatctgctggactcctggattggttttgttacttctagacgtgtgctgtccacagtgcgacgtgctggcctatgagaaattcttccttctccttgctgaattcaactctgccatgaaccccatcatttactcctaccgcgacaaagaaatgagcgccacctttaggcagatcctctgctgccagcgcagtgagaaccccaccggccccacagaaggctcagaccgctcggcttcctccctcaaccacaccatcttggctggagttcacagcaatgaccactctgtggtttagaacggaaactgagatgaggaaccagccgtcctctcttggaggataaacagcctccccctacccaattgccagggcaaggtggggtgtgagagaggagaaaagtcaactcatgtacttaaacactaaccaatgacagtatttgttcctggaccccacaagacttgatatatattgaaaattagcttatgtgacaaccctcatcttgatccccatcccttctgaaagtaggaagttggagctcttgcaatggaattcaagaacagactctggagtgtccatttagactacactaactagacttttaaaagattttgtgtggtttggtgcaagtcagaataaattctggctagttgaatccacaacttcatttatatacaggcttcccttttttatttttaaaggatacgtttcacttaataaacacgtttatgcctatcagcatgtttgtgatggatgagactatggactgcttttaaactaccataattccattttttcccttacataggaaaactgtaagttggaattatcttttgtttagaaagcatgcatgtaatgtatgtatgcagtatgccttacttaaaaagattaaaaggatactaatgttaaatcttctaggaaatagaacctagacttcaaagccagtatttgtttaggtcatgaagcaaacaatgctctaatcacaatattaactgtttaattaaaatgttgtaacaagtataaaacagggaatgtaagtttattaccaaagtgatatgtattccaaaaaagtcatagaagatgaagcactataatattgttcccatatatttaaaatacccaagtacattctaattaccagtatatcagaggaaaattttcgtagtctttgtaaaataatatactcatcatagaaaacttgaaaaatgcagaaatgtataaaaaagcaaaaatgattactgataatatcacaacccagaagtaaccacctttaaaaagcaacccccatgtatgcctatatgtgtattgtatactttttttacataattggagtcatactgtaaacagttttataagtagatctttttcattgcaaaattgccacattttcttatggcattaaaaattttacaaaaacataattttaatggctatattatattccatttaatggatgcaactcagtttatttaaccattcccatgttgttaactatttaggttgtttctaattttcattattataaagttgcagaaatttggtgt

SEQ ID NO: 40 - DNA, 768 bp, Homo sapiens
ccttcagcataaaagctgatccacaaacaagaggagcaccagacctcctcttggcttcgagatggcttcgccacaccaagagcccaaacctggagacctgattgagattttccgccttggctatgagcactgggccctgtatataggagatggctacgtgatccatctggctcctccaagtgagtaccccggggctggctcctccagtgtcttctcagtcctgagcaacagtgcagaggtgaaacgggggcgcctggaagatgtggtgggaggctgttgctatcgggtcaacaacagcttggaccatgagtaccaaccacggcccgtggaggtgatcatcagttctgcgaaggagatggttggtcagaagatgaagtacagtattgtgagcaggaactgtgagcactttgtcgcccagctgagatatggcaagtcccgctgtaaacaggtggaaaaggccaaggttgaagtcggtgtggccacggcgcttggaatcctggttgttgctggatgctcttttgcgattaggagataccaaaaaaaagcaacagcctgaagcagccacaaaatcctgtgttagaagcagctgtgggggtcccagtggagatgagcctcccccatgcctccagcagcctgaccctcgtgccctgtctcaggcgttctctagatcctttcctctgtttccctctctcgctggcaaaagtatgatctaattgaaacaagactgaaggatcaataaacagccatctgccccttcaaaaaaaaaaa

SEQ ID NO: 41 - DNA, 1398 bp, Homo sapiens
agcggaggggcgccctaacgaacccgggatacggtctgttcctagtccgctccggaaatgcaactgcgtacgggctggccgcgtaatcgtgacgacagcgcgccagcgccggctagccggacgccctaggcttccgcgagatcttcggtgggggtacgggtgttttacgccaggacgctgatgcgtttgggttctcgtctgcagaccctctggacctggtcacgattccataatgtaccacaacagtagtcagaagcggcactggaccttctccagcgaggagcagctggcaagactgcgggctgacgccaaccgcaaattcagatgcaaagccgtggccaacgggaaggttcttccgaatgatccagtctttcttgagcctcatgaagaaatgacactctgcaaatactatgagaaaaggttattggaattctgttcggtgtttaagccagcaatgccaagatctgttgtgggtacggcttgtatgtatttcaaacgtttttatcttaataactcagtaatggaatatcaccccaggataataatgctcacttgtgcatttttggcctgcaaagtagatgaattcaatgtatctagtcctcagtttgttggaaacctccgggagagtcctcttggacaggagaaggcacttgaacagatactggaatatgaactacttcttatacagcaacttaatttccaccttattgtccacaatccttacagaccatttgagggcttcctcatcgacttaaagacccgctatcccatattggagaatccagagattttgaggaaaacagctgatgactttcttaatagaattgcattgacggatgcttaccttttatacacaccttcccaaattgccctgactgccattttatctagtgcctccagggctggaattactatggaaagttatttatcagagagtctgatgctgaaagagaacagaacttgcctgtcacagttactagatataatgaaaagcatgagaaacttagtaaagaagtatgaaccacccagatctgaagaagttgctgttctgaaacagaagttggagcgatgtcattctgctgagcttgcacttaacgtaatcacgaagaagaggaaaggctatgaagatgatgattacgtctcaaagaaatccaaacatgaggaggaagaatggactgatgacgacctggtagaatctctctaaccatttgaagttgatttctcaatgctaactaatcaagagaagtaggaagcatatcaaacgtttaactttatttaaaaagtataatgtgaaaacataaaatatattaaaacttttctattgttttctttccctttcacagtaactttatgtaaaataaaccatcttcaaaagagctagaataaaaaaaaaaaaaa

SEQ ID NO: 42 - DNA, 2756 bp, Homo sapiens
atgctgtccttccagtaccccgacgtgtaccgcgacgagaccgccgtacaggattatcatggtcataaaatttgtgacccttacgcctggcttgaagaccccgacagtgaacagactaaggcctttgtggaggcccagaataagattactgtgccatttcttgagcagtgtcccatcagaggtttatacaaagagagaatgactgaactatatgattatcccaagtatagttgccacttcaagaaaggaaaacggtatttttatttttacaatacaggtttgcagaaccagcgagtattatatgtacaggattccttagagggtgaggccagagtgttcctggaccccaacatactgtctgacgatggcacagtggcactccgaggttatgcgttcagcgaagatggtgaatattttgcctatggtctgagtgccagtggctcagactgggtgacaatcaagttcatgaaagttgatggtgccaaagagcttccagatgtgcttgaaagagtcaagttcagctgtatggcctggacccatgatgggaagggaatgttctacaactcataccctcaacaggatggaaaaagtgatggcacagagacatctaccaatctccaccaaaagctctactaccatgtcttgggaaccgatcagtcagaagatattttgtgtgctgagtttcctgatgaacctaaatggatgggtggagctgagttatctgatgatggccgctatgtcttgttatcaataagggaaggatgtgatccagtaaaccgactctggtactgtgacctacagcaggaatccagtggcatcgcgggaatcctgaagtgggtaaaactgattgacaactttgaaggggaatatgactacgtgaccaatgagggggcggtgttcacattcaagacgaatcgccagtctcccaactatcgcgtgatcaacattgacttcagggatcctgaagagtctaagtggaaagtacttgttcctgagcatgagaaagatgtcttagaatggatagcttgtgtcaggtccaacttcttggtcttatgctacctccatgacgtcaagaacattctgcagctccatgacctgactactggtgctctccttaagaccttcccgctcgatgtcggcagcattgtagggtacagcggtcagaagaaggacactgaaatcttctatcagtttacttcctttttatctccaggtatcatttatcactgtgatcttaccaaagaggagctggagccaagagttttccgagaggtgaccgtaaaaggaattgatgcttctgattaccagacagtccagattttctaccctagcaaggatggtacgaagattccaatgttcattgtgcataaaaaaagcataaaattggatggctctcatccagctttcttatatggctatggcggcttcaacatatccatcacacccaactacagtgtttccaggcttatttttgtgagacacatgggtggtatcctggcagtggccaacatcagaggaggtggcgaatatggagagacgtggcataaaggtggtatcttggccaacaaacaaaactgctttgatgactttcagtgtgctgctgagtatctgatcaaggaaggttacacatctcccaagaggctgactattaatggaggttcaaatggaggcctcttagtggctgcttgtgcaaatcagagacctgacctctttggttgtgttattgcccaagttggagtaatggacatgctgaagtttcataaatataccatcggccatgcttggaccactgattatgggtgctcggacagcaaacaacactttgaatggcttgtcaaatactctccattgcataatgtgaagttaccagaagcagatgacatccagtacccgtccatgctgctcctcactgctgaccatgatgaccgcgtggtcccgcttcactccctgaagttcattgccacccttcagtacatcgtgggccgcagcaggaagcaaagcaaccccctgcttatccacgtggacaccaaggcgggccacggggcggggaagcccacagccaaagtgatagaggaagtctcagacatgtttgcgttcatcgcgcggtgcctgaacgtcgactggattccataaacagttttcgtgcttcctcctgacagcgacagaaaacctcaagggctttcccacgttgacaccaagaaaccactgggcataatgcttccccacgggaacattattcctggactgacaggctacagttgaacagaactgccgtgggaattttatcttttttaggcttctcctttttagcaaggccttggtgtttctttttccaccctgtctaggcacatgtggttttttggtgttttttttaagggcatgttgggataaatagctaaatggcaacaaacacattgtgaatattagattgctgaattaaggatcatagtcgggcatacttatctatatccataacctctatatctttaaataaatgtgagaactgttctcatggagaagacttctttgcaacaataataaatgttatttaagaatgacagggatttacttccggtttcttcatattgaggggcaactccagaagtggagttttctgtgagaataaagcatttcacctttctgcaacaagttagttttcaagcagttaagtcatagaatgtttgttagctgtgaaaataagttgttcatccaaaaaaaaaaaaaaaaaaaaaaaaaaaaaaaaaaaaaaggaattc

SEQ ID NO: 43 - DNA, 6319 bp, Homo sapiens
acacagtactctcagcttgttggtggaagcccctcatctgccttcattctgaaggcagggcccggcagaggaaggatcagagggtcgcggccggagggtcccggccggtggggccaactcagagggagaggaaagggctagagacacgaagaacgcaaaccatcaaatttagaagaaaaagccctttgactttttccccctctccctccccaatggctgtgtagcaaacatccctggcgataccttggaaaggacgaagttggtctgcagtcgcaatttcgtgggttgagttcacagttgtgagtgcggggctcggagatggagccgtggtcctctaggtggaaaacgaaacggtggctctgggatttcaccgtaacaaccctcgcattgaccttcctcttccaagctagagaggtcagaggagctgctccagttgatgtactaaaagcactagattttcacaattctccagagggaatatcaaaaacaacgggattttgcacaaacagaaagaattctaaaggctcagatactgcttacagagtttcaaagcaagcacaactcagtgccccaacaaaacagttatttccaggtggaactttcccagaagacttttcaatactatttacagtaaaaccaaaaaaaggaattcagtctttccttttatctatatataatgagcatggtattcagcaaattggtgttgaggttgggagatcacctgtttttctgtttgaagaccacactggaaaacctgccccagaagactatcccctcttcagaactgttaacatcgctgacgggaagtggcatcgggtagcaatcagcgtggagaagaaaactgtgacaatgattgttgattgtaagaagaaaaccacgaaaccacttgatagaagtgagagagcaattgttgataccaatggaatcacggtttttggaacaaggattttggatgaagaagtttttgagggggacattcagcagtttttgatcacaggtgatcccaaggcagcatatgactactgtgagcattatagtccagactgtgactcttcagcacccaaggctgctcaagctcaggaacctcagatagatgagtatgcaccagaggatataatcgaatatgactatgagtatggggaagcagagtataaagaggctgaaagtgtaacagagggacccactgtaactgaggagacaatagcacagacggaggcaaacatcgttgatgattttcaagaatacaactatggaacaatggaaagttaccagacagaagctcctaggcatgtttctgggacaaatgagccaaatccagttgaagaaatatttactgaagaatatctaacgggagaggattatgattcccagaggaaaaattctgaggatacactatatgaaaacaaagaaatagacggcagggattctgatcttctggtagatggagatttaggcgaatatgatttttatgaatataaagaatatgaagataaaccaacaagcccccctaatgaagaatttggtccaggtgtaccagcagaaactgatattacagaaacaagcataaatggccatggtgcatatggagagaaaggacagaaaggagaaccagcagtggttgagcctggtatgcttgtcgaaggaccaccaggaccagcaggacctgcaggtattatgggtcctccaggtctacaaggccccactggaccccctggtgaccctggcgataggggccccccaggacgtcctggcttaccaggggctgatggtctacctggtcctcctggtactatgttgatgttaccgttccgttatggtggtgatggttccaaaggaccaaccatctctgctcaggaagctcaggctcaagctattcttcagcaggctcggattgctctgagaggcccacctggcccaatgggtctaactggaagaccaggtcctgtgggggggcctggttcatctggggccaaaggtgagagtggtgatccaggtcctcagggccctcgaggcgtccagggtccccctggtccaacgggaaaacctggaaaaaggggtcgtccaggtgcagatggaggaagaggaatgccaggagaacctggggcaaagggagatcgagggtttgatggacttccgggtctgccaggtgacaaaggtcacaggggtgaacgaggtcctcaaggtcctccaggtcctcctggtgatgatggaatgaggggagaagatggagaaattggaccaagaggtcttccaggtgaagctggcccacgaggtttgctgggtccaaggggaactccaggagctccagggcagcctggtatggcaggtgtagatggccccccaggaccaaaagggaacatgggtccccaaggggagcctgggcctccaggtcaacaagggaatccaggacctcagggtcttcctggtccacaaggtccaattggtcctcctggtgaaaaaggaccacaaggaaaaccaggacttgctggacttcctggtgctgatgggcctcctggtcatcctgggaaagaaggccagtctggagaaaagggggctctgggtccccctggtccacaaggtcctattggatacccgggcccccggggagtaaagggagcagatggtgtcagaggtctcaagggatctaaaggtgaaaagggtgaagatggttttccaggattcaaaggtgacatgggtctaaaaggtgacagaggagaagttggtcaaattggcccaagaggggaagatggccctgaaggacccaaaggtcgagcaggcccaactggagacccaggtccttcaggtcaagcaggagaaaagggaaaacttggagttccaggattaccaggatatccaggaagacaaggtccaaagggttccactggattccctgggtttccaggtgccaatggagagaaaggtgcacggggagtagctggcaaaccaggccctcggggtcagcgtggtccaacgggtcctcgaggttcaagaggtgcaagaggtcccactgggaaacctgggccaaagggcacttcaggtggcgatggccctcctggccctccaggtgaaagaggtcctcaaggacctcagggtccagttggattccctggaccaaaaggccctcctggaccaccaggaaggatgggctgcccaggacaccctgggcaacgtggggagactggatttcaaggcaagaccggccctcctgggccagggggagtggttggaccacagggaccaaccggtgagactggtccaataggggaacgtgggcatcctggccctcctggccctcctggtgagcaaggtcttcctggtgctgcaggaaaagaaggtgcaaagggtgatccaggtcctcaaggtatctcagggaaagatggaccagcaggattacgtggtttcccaggggaaagaggtcttcctggagctcagggtgcacctggactgaaaggaggggaaggtccccagggcccaccaggtccagttggctcaccaggagaacgtgggtcagcaggtacagctggcccaattggtttaccagggcgcccgggacctcagggtcctcctggtccagctggagagaaaggtgctcctggagaaaaaggtccccaagggcctgcagggagagatggagttcaaggtcctgttggtctcccagggccagctggtcctgccggctcccctggggaagacggagacaagggtgaaattggtgagccgggacaaaaaggcagcaagggtgacaagggagaaaatggccctcccggtcccccaggtcttcaaggaccagttggtgcccctggaattgctggaggtgatggtgaaccaggtcctagaggacagcaggggatgtttgggcaaaaaggtgatgagggtgccagaggcttccctggacctcctggtccaataggtcttcagggtctgccaggcccacctggtgaaaaaggtgaaaatggggatgttggtccatgggggccacctggtcctccaggcccaagaggccctcaaggtcccaatggagctgatggaccacaaggacccccaggttctgttggttcagttggtggtgttggagaaaagggtgaacctggagaagcaggaaacccagggcctcctggggaagcaggtgtaggcggtcccaaaggagaaagaggagagaaaggggaagctggtccacctggagctgctggacctccaggtgccaaggggccgccaggtgatgatggccctaagggtaacccgggtcctgttggttttcctggagatcctggtcctcctggggaacttggccctgcaggtcaagatggtgttggtggtgacaagggtgaagatggagatcctggtcaaccgggtcctcctggcccatctggtgaggctggcccaccaggtcctcctggaaaacgaggtcctcctggagctgcaggtgcagagggaagacaaggtgaaaaaggtgctaagggggaagcaggtgcagaaggtcctcctggaaaaaccggcccagtcggtcctcagggacctgcaggaaagcctggtccagaaggtcttcggggcatccctggtcctgtgggagaacaaggtctccctggagctgcaggccaagatggaccacctggtcctatgggacctcctggcttacctggtctcaaaggtgaccctggctccaagggtgaaaagggacatcctggtttaattggcctgattggtcctccaggagaacaaggggaaaaaggtgaccgagggctccctggaactcaaggatctccaggagcaaaaggggatgggggaattcctggtcctgctggtcccttaggtccacctggtcctccaggcttaccaggtcctcaaggcccaaagggtaacaaaggctctactggacccgctggccagaaaggtgacagtggtcttccagggcctcctgggcctccaggtccacctggtgaagtcattcagcctttaccaatcttgtcctccaaaaaaacgagaagacatactgaaggcatgcaagcagatgcagatgataatattcttgattactcggatggaatggaagaaatatttggttccctcaattccctgaaacaagacatcgagcatatgaaatttccaatgggtactcagaccaatccagcccgaacttgtaaagacctgcaactcagccatcctgacttcccagatggtgaatattggattgatcctaaccaaggttgctcaggagattccttcaaagtttactgtaatttcacatctggtggtgagacttgcatttatccagacaaaaaatctgagggagtaagaatttcatcatggccaaaggagaaaccaggaagttggtttagtgaatttaagaggggaaaactgctttcatacttagatgttgaaggaaattccatcaatatggtgcaaatgacattcctgaaacttctgactgcctctgctcggcaaaatttcacctaccactgtcatcagtcagcagcctggtatgatgtgtcatcaggaagttatgacaaagcacttcgcttcctgggatcaaatgatgaggagatgtcctatgacaataatccttttatcaaaacactgtatgatggttgtacgtccagaaaaggctatgaaaagactgtcattgaaatcaatacaccaaaaattgatcaagtacctattgttgatgtcatgatcaatgactttggtgatcagaatcagaagttcggatttgaagttggtcctgtttgttttcttggctaagattaagacaaagaacatatcaaatcaacagaaaatataccttggtgccaccaacccattttgtgccacatgcaagttttgaataaggatggtatagaaaacaacgctgcatatacaggtaccatttaggaaataccgatgcctttgtgggggcagaatcacatggcaaaagctttgaaaatcataaagatataagttggtgtggctaagatggaaacagggctgattcttgattcccaattctcaactctccttttcctatttgaatttctttggtgctgtagaaaacaaaaaaagaaaaatatatattcataaaaaatatggtgctcattctcatccatccaggatgtactaaaacagtgtgtttaataaattgtaattattttgtgtacagttctatactgttatctgtgtccatttccaaaacttgcacgtgtccctgaattccatctgactctaattttatgagaattgcagaactctgatggcaataaatatatgtattatgaaaaaataaagttgtaatttctgatgactctaagtccctttctttggttaataataaaatgcctttgtatat

SEQ ID NO: 44 - DNA, 3986 bp, Homo sapiens
atgctggggaagagccatggtaggaccactcatggccctcttcctttggcggaccttggaatccaccttccctgcgttaaagtgctccaccaggtgacgccggaagagaagccagcaggcggcggcggcgtcagcatcagcggcctcctgcccgtatctatcgtggcggcgacgggacccgcctccctgggcgccggagtcatgtgacccacacaatggctgagtggctactctcggcttcctggcaacgccgagcgaaagctatgactgcggccgcgggttcggcgggccgcgccgcggtgcccttgctgctgtgtgcgctgctggcgcccggcggcgcgtacgtgctcgacgactccgacgggctgggccgggagttcgacggcatcggcgcggtcagcggcggcggggcaacctcccgacttctagtaaattacccagagccctatcgttctcagatattggattatctctttaagccgaattttggtgcctctttgcatattttaaaagtggaaataggtggtgatgggcagacaacagacggcactgagccctcccacatgcattatgcactagatgagaattatttccgaggatacgagtggtggttgatgaaagaagctaagaagaggaatcccaatattacactcattgggttgccatggtcattccctggatggctgggaaaaggtttcgactggccttatgtcaatcttcagctgactgcctattatgtcgtgacctggattgtgggcgccaagcgttaccatgatttggacattgattatattggaatttggaatgagaggtcatataatgccaattatattaagatattaagaaaaatgctgaattatcaaggtctccagcgagtgaaaatcatagcaagtgataatctctgggagtccatctctgcatccatgctccttgatgccgaactcttcaaggtggttgatgttataggggctcattatcctggaacccattcagcaaaagatgcaaagttgactgggaagaagctttggtcttctgaagactttagcactttaaatagtgacatgggtgcaggctgctggggtcgcattttaaatcagaattatatcaatggctatatgacttccacaatcgcatggaatttagtggctagttactatgaacagttgccttatgggagatgcgggttgatgacggcccaagagccatggagtgggcactacgtggtagaatctcctgtctgggtatcagctcataccactcagtttactcaacctggctggtattacctgaagacagttggccatttagagaaaggaggaagctacgtagctctgactgatggcttagggaacctcaccatcatcattgaaaccatgagtcataaacattctaagtgcatacggccatttcttccttatttcaatgtgtcacaacaatttgccacctttgttcttaagggatcttttagtgaaataccagagctacaggtatggtataccaaacttggaaaaacatccgaaagatttctttttaagcagctggattctctatggctccttgacagcgatggcagtttcacactgagcctgcatgaagatgagctgttcacactcaccactctcaccactggtcgcaaaggcagctacccgcttcctccaaaatcccagcccttcccaagtacctataaggatgatttcaatgttgattacccattttttagtgaagctccaaactttgctgatcaaactggtgtatttgaatattttacaaatattgaagaccctggcgagcatcacttcacgctacgccaagttctcaaccagagacccattacgtgggctgccgatgcatccaacacaatcagtattataggagactacaactggaccaatctgactataaagtgtgatgtttacatagagacccctgacacaggaggtgtgttcattgcaggaagagtaaataaaggtggtattttgattagaagtgccagaggaattttcttctggatttttgcaaatggatcttacagggttacaggtgatttagctggatggattatatatgctttaggacgtgttgaagttacagcaaaaaaatggtatacactcacgttaactattaagggtcatttcgcctctggcatgctgaatgacaagtctctgtggacagacatccctgtgaattttccaaagaatggctgggctgcaattggaactcactcctttgaatttgcacagtttgacaactttcttgtggaagccacacgctaatacttaacagggcatcatagaatactctggattttcttcccttctttttggttttggttcagagccaattcttgtttcattggaacagtatatgaggcttttgagactaaaaataatgaagagtaaaaggggagagaaatttatttttaatttaccctgtggaagattttattagaattaattccaaggggaaaactggtgaatctttaacattacctggtgtgttccctaacattcaaactgtgcattggccatacccttaggagtggtttgagtagtacagacctcgaagccttgctgctaacactgaggtagctctcttcatcttatttgcaagcggtcctgtagatggcagtaacttgatcatcactgagatgtatttatgcatgctgaccgtgtgtccaagtgagccagtgtcttcatcacaagatgatgctgccataatagaaagctgaagaacactagaagtagctttttgaaaaccacttcaacctgttatgctttatgctctaaaaagtatttttttattttcctttttaagatgatacttttgaaatgcaggatatgatgagtgggatgattttaaaaacgcctctttaataaactacctctaacactatttctgcggtaatagatattagcagattaattgggttatttgcattatttaatttttttgattccaagttttggtcttgtaaccactataactctctgtgaacgtttttccaggtggctggaagaaggaagaaaacctgatatagccaatgctgttgtagtcgtttcctcagcctcatctcactgtgctgtggtctgtcctcacatgtgcactggtaacagactcacacagctgatgaatgcttttctctccttatgtgtggaaggaggggagcacttagacatttgctaactcccagaattggatcatctcctaagatgtacttactttttaaagtccaaatatgtttatatttaaatatacgtgagcatgttcatcatgttgtatgatttatactaagcattaatgtggctctatgtagcaaatcagttattcatgtaggtaaagtaaatctagaattatttataagaattactcattgaactaattctactatttaggaatttataagagtctaacataggcttagctacagtgaagttttgcattgcttttgaagacaagaaaagtgctagaataaataagattacagagaaaattttttgttaaaaccaagtgatttccagctgatgtatctaatattttttaaaacaaacattatagaggtgtaatttatttacaataaaatgttcctactttaaatatacaattcagtgagttttgataaattgatatacccatgtaaccaacactccagtcaagcttcagaatatttccatcaccccagaaggttctcttgtatacctgctcagtcagttcctttcactcccaattgttggcagccattgataggaattctatcactataggttagttttctttgttccagaacatcatgaaagcggcgtcatgtactgtgtattcttatgaatggtttctttccatcagcataatgatttgagattggtccatgttgtgtgattcagtggtttgttccttcttatttctgaagagttttccattgtatgaatataccacaatttgtttcctccccaccagtttctgatactacaattaaaactgtctacatttac

SEQ ID NO: 45 - DNA, 2058 bp, Homo sapiens
cggtttctgctgggtttctgaactgctgggtttctgcttgctcctctggagatgcagcgtctgttgactccagtgaagcgcattctgcaactgacaagagcggtgcaggaaacctccctcacacctgctcgcctgctcccagtagcccaccaaaggttttctacagcctctgctgtccccctggccaaaacagatacttggccaaaggacgtgggcatcctggccctggaggtctacttcccagcccaatatgtggaccaaactgacctggagaagtataacaatgtggaagcaggaaagtatacagtgggcttgggccagacccgtatgggcttctgctcagtccaagaggacatcaactccctgtgcctgacggtggtgcaacggctgatggagcgcatacagctcccatgggactctgtgggcaggctggaagtaggcactgagaccatcattgacaagtccaaagctgtcaaaacagtgctcatggaactcttccaggattcaggcaatactgatattgagggcatagataccaccaatgcctgctacggtggtactgcctccctcttcaatgctgccaactggatggagtccagttcctgggatggtcgttatgccatggtggtctgtggagacattgccgtctatcccagtggtaatgctcgtcccacaggtggggccggagctgtggctatgctgattggcccaaaggcccctctggccctggagcgagggctgaggggaacccatatggagaatgtgtatgacttctacaaaccaaatttggcctcggagtacccaatagtggatgggaagctttccatccagtgctacttgcgggccttggatcgatgttacacatcataccgtaaaaaaatccagaatcagtggaagcaagctggcagcgatcgacccttcacccttgacgatttacagtatatgatctttcatacacccttttgcaagatggtccagaagtctctggctcgcctgatgttcaatgacttcctgtcagccagcagtgacacacaaaccagcttatataaggggctggaggctttcggggggctaaagctggaagacacctacaccaacaaggacctggataaagcacttctaaaggcctctcaggacatgttcgacaagaaaaccaaggcttccctttacctctccactcacaatgggaacatgtacacctcatccctgtacgggtgcctggcctcgcttctgtcccaccactctgcccaagaactggctggctccaggattggtgccttctcttatggctctggtttagcagcaagtttcttttcatttcgagtatcccaggatgctgctccaggctctcccctggacaagttggtgtccagcacatcagacctgccaaaacgcctagcctcccgaaagtgtgtgtctcctgaggagttcacagaaataatgaaccaaagagagcaattctaccataaggtgaatttctccccacctggtgacacaaacagccttttcccaggtacttggtacctggagcgagtggacgagcagcatcgccgaaagtatgcccggcgtcccgtctaaaggtgttctgcagatccatggaaagcttcctgggaaacgtatgctagcagagcttctccccgtgaatcatatttttaagatcccactcttagctggtaaatgaatttgaatcgacatagtagccccataagcatcagccctgtagagtgaggagccatctctagcgggcccttcattcctctccatgctgcaatcactgtcctgggcttatggtgcctatggactaggggtcctttgtgaaagagcaagatggagcaatggagagaagacctcttcctgaatcactggactccagaaatgtgcatgcagatcagctgttgccttcaagatccagataaactttcctgtcatgtgttagaactttattattattaatattgttaaacttctgtgctgttcctgtgaatctccaaattttgtaccttgttctaagctaatatatagcaattaaaaagagagaaagagaaaaaaaaaaaaaaa

SEQ ID NO: 46 - DNA, 2538 bp, Homo sapiens
cgcccccaccgccacccaaccaagcatcacccattccagcacttccggcctgacccctgtccagcgcctttcctttctccagcttctgctctgccccaagagtggtcgccttcgtggcagggcacgactctctcccagctcgggtcgccgcccacattagtgtggggccctgcggcctagcgtccctcaccagaggcctccccttgcctagctggaccgccgagggacatcgacgagtatcctcctcctgctgtccccggcttcgcctgccgcccctaaccggccagtcaagatggccgccgctgggtgaggcaagctggcgcgccgcgggggcgtctgggagttgtagttcgggacggcgggctgacgcacttcgccgccggccgacgggcgccattgtgcggcgcgcgccggagtatcctgagctccagctggaccctaaattggatcctcttcctgctgagagtcccctaatgaacattgaggttgttgaggtcctcacactgaaccaggaggtggctggtccccggaatgcccagatccaggccctatatgctgaagatggaagcctgagtgcagatgcccccagtgagcaggtccaacagcagggcaagcatccaggtgaccctgaggccgcgcgccagaggttccggcagttccgttataaggacatgacaggtccccgggaggccctggaccagctccgagagctgtgtcaccagtggctacagcctaaggcacgctccaaggagcagatcctggagctgctggtgctggagcagttcctaggtgcactgcctgtgaagctccggacatgggtggaatcgcagcacccagagaactgccaagaggtggtggccctggtagagggtgtgacctggatgtctgaggaggaagtacttcctgcaggacaacctgccgagggcaccacctgctgcctcgaggtcactgcccagcaggaggagaagcaggaggatgcagccatctgcccagtgacagtgctccctgaggagccagtgaccttccaggatgtggctgtggacttcagccgggaggagtgggggctgctgggcccgacacagaggaccgagtaccgcgatgtgatgctggagacctttgggcacctggtctctgtggggtgggagactacactggaaaataaagagttagctccaaattctgacattcctgaggaagaaccagcccccagcctgaaagtacaagaatcctcaagggattgtgccttgtcctctacattagaagataccttgcagggtggggtccaggaagtccaagacacagtgttgaagcagatggagtctgctcaggaaaaagaccttcctcagaagaagcactttgacaaccgtgagtcccaggcaaacagtggtgctcttgacacaaaccaagtttcgctccagaaaattgacaaccctgagtcccaggcaaacagtggcgctcttgacacaaaccaagttttgctccacaaaattcctcctagaaaacgattgcgcaaacgtgactcacaagttaaaagtatgaaacataattcacgtgtaaaaattcatcagaagagctgtgaaaggcaaaaggccaaggaaggcaatggttgtaggaaaaccttcagtcggagtactaaacagattacgtttataagaattcacaaggggagccaagtttgccgatgcagtgaatgtggtaaaatattccggaacccaagatacttttctgtgcataagaaaatccataccggagagaggccctatgtgtgtcaagactgtgggaaaggatttgttcagagctcttccctcacacagcatcagagagttcattctggagagagaccatttgaatgtcaggagtgtgggaggaccttcaatgatcgctcagccatctcccagcacctgaggactcacactggcgctaagccctacaagtgtcaggactgtggaaaagccttccgccagagctcccacctcatcagacatcagaggactcacaccggggagcgcccatatgcatgcaacaaatgtggaaaggccttcacccagagctcacaccttattgggcaccagagaacccacaataggacaaagcgaaagaagaaacagcctacctcatagctctcaagccagttgaagaaaccttgccttttcagcttgaccctgcaatataacatgcacaggcctgcttgtgaatcaggactgaatgtgaaagggaagtattgagtgaggacattcccaaaaccaaaggacaactgaggagactgcccagcacataatgaataaataagaaaatgagtgaggagttattaacatcatttggaaaaaagatttcccattcacttgatattgtttgttcactcatttagtcattaaaagtgagattaataaaatctgaaaatgttatataataactttaaaaagccaggtaattaataatctgcactgatattacatccacagtaccacagtatttatgtgtatgaattaaggattaaaagataatgtggataaataaactattgatctatgtctgtgt

SEQ ID NO: 47 - DNA, 540 bp, Homo sapiens
atccctgactcggggtcgcctttggagcagagaggaggcaatggccaccatggagaacaaggtgatctgcgccctggtcctggtgtccatgctggccctcggcaccctggccgaggcccagacagagacgtgtacagtggccccccgtgaaagacagaattgtggttttcctggtgtcacgccctcccagtgtgcaaataagggctgctgtttcgacgacaccgttcgtggggtcccctggtgcttctatcctaataccatcgacgtccctccagaagaggagtgtgaattttagacacttctgcagggatctgcctgcatcctgacggggtgccgtccccagcacggtgattagtcccagagctcggctgccacctccaccggacacctcagacacgcttctgcagctgtgcctcggctcacaacacagattgactgctctgactttgactactcaaaattggcctaaaaattaaaagagatcgatattaaaaaaaaaaaaaaaaaaaaaaaaaaaaaaaaaaaaaaaaaaaaaaaaaa

SEQ ID NO: 48 - DNA, 2254 bp, Homo sapiens
gggaattctgaaagccgctggcggaccgcgcgcagcggccagagaccgagccctaaggagagtgcggcgcttcccgaggcgtgcagctgggaactgcaactcatctgggttgtgcgcagaaggctggggcaagcgagtagagaagtggagcgtaagccaggggcgttgggggccgtgcgggtcgggcgcgtgccacgcccgcggggtgaagtcggagcgcggggcctgctggagagaggagcgctgcggaccgagtaatggcaatgcagatgcagcttgaagcaaatgcagatacttcagtggaagaagaaagctttggcccacaacccatttcacggttagagcagtgtggcataaatgccaacgatgtgaagaaattggaagaagctggattccatactgtggaggctgttgcctatgcgccaaagaaggagctaataaatattaagggaattagtgaagccaaagctgataaaattctggctgaggcagctaaattagttccaatgggtttcaccactgcaactgaattccaccaaaggcggtcagagatcatacagattactactggctccaaagagcttgacaaactacttcaaggtggaattgagactggatctatcacagaaatgtttggagaattccgaactgggaagacccagatctgtcatacgctagctgtcacctgccagcttcccattgaccggggtggaggtgaaggaaaggccatgtacattgacactgagggtacctttaggccagaacggctgctggcagtggctgagaggtatggtctctctggcagtgatgtcctggataatgtagcatatgctcgagcgttcaacacagaccaccagacccagctcctttatcaagcatcagccatgatggtagaatctaggtatgcactgcttattgtagacagtgccaccgccctttacagaacagactactcgggtcgaggtgagctttcagccaggcagatgcacttggccaggtttctgcggatgcttctgcgactcgctgatgagtttggtgtagcagtggtaatcactaatcaggtggtagctcaagtggatggagcagcgatgtttgctgctgatcccaaaaaacctattggaggaaatatcatcgcccatgcatcaacaaccagattgtatctgaggaaaggaagaggggaaaccagaatctgcaaaatctacgactctccctgtcttcctgaagctgaagctatgttcgccattaatgcagatggagtgggagatgccaaagactgaatcattgggtttttcctctgttaaaaaccttaagtgctgcagcctaatgagagtgcactgctccctggggttctctacaggcctcttcctgttgtgactgccaggataaagcttccgggaaaacagctattatatcagcttttctgatggtataaacaggagacaggtcagtagtcacaaactgatctaaaatgtttattccttctgtagtgtattaatctctgtgtgttttctttggttttggaggaggggtatgaagtatctttgacatggtgccttaggaatgacttgggtttaacaagctgtctactggacaatcttatgtttccaagagaactaaagctggagagacctgacccttctctcacttctaaattaatggtaaaataaaatgcctcagctatgtagcaaagggaatgggtctgcacagattctttttttctgtcagtaaaactctcaagcaggtttttaagttgtctgtctgaatgatcttgtgtaagggtttggttatggagtcttgtgccaaacctactaggccattagcccttcaccatctacctgcttggtctttcattgctaagactaactcaagataatcctagagtcttaaagcatttcaggccagtgtggtgtcttgcgcctgtactcccagcactttgggaggccgaggcaggtggatcgcttgagccaggagttttaagtccagcttggccaagatggtgaaatcccatctctacaaaaaatgcagaacttaatctggacacactgttacacgtgcctgtagtcccagctactctatagcctgaggtgggagaatcacttaagcctggaaggtggaagttgcagtgagtcgagattgcactgctgcattccagccagggtgacagagtgagaccatgtttcaaacaagaaacatttcagagggcaagtaaacagatttgattgtgaggcttctaataaagtagttattagtagtg

SEQ ID NO: 49 - DNA, 1994 bp, Homo sapiens
aaacttcccgcacgcgttacaggagccaggtcggtataagcgccagcggcctcgccgcccgtcaagctgtccacatccctggcctcagcccgccacatcaccctgacctgcttacgcccagattttcttcaatcacatctgaataaatcacttgaagaaagcttatagcttcattgcaccatgtgtggcatttgggcgctgtttggcagtgatgattgcctttctgttcagtgtctgagtgctatgaagattgcacacagaggtccagatgcattccgttttgagaatgtcaatggatacaccaactgctgctttggatttcaccggttggcggtagttgacccgctgtttggaatgcagccaattcgagtgaagaaatatccgtatttgtggctctgttacaatggtgaaatctacaaccataagaagatgcaacagcattttgaatttgaataccagaccaaagtggatggtgagataatccttcatctttatgacaaaggaggaattgagcaaacaatttgtatgttggatggtgtgtttgcatttgttttactggatactgccaataagaaagtgttcctgggtagagatacatatggagtcagacctttgtttaaagcaatgacagaagatggatttttggctgtatgttcagaagctaaaggtcttgttacattgaagcactccgcgactccctttttaaaagtggagccttttcttcctggacactatgaagttttggatttaaagccaaatggcaaagttgcatccgtggaaatggttaaatatcatcactgtcgggatgaacccctgcacgccctctatgacaatgtggagaaactctttccaggttttgagatagaaactgtgaagaacaacctcaggatcctttttaataatgctgtaaagaaacgtttgatgacagacagaaggattggctgccttttatcagggggcttggactccagcttggttgctgccactctgttgaagcagctgaaagaagcccaagtacagtatcctctccagacatttgcaattggcatggaagacagccccgatttactggctgctagaaaggtggcagatcatattggaagtgaacattatgaagtcctttttaactctgaggaaggcattcaggctctggatgaagtcatattttccttggaaacttatgacattacaacagttcgtgcttcagtaggtatgtatttaatttccaagtatattcggaagaacacagatagcgtggtgatcttctctggagaaggatcagatgaacttacgcagggttacatatattttcacaaggctccttctcctgaaaaagccgaggaggagagtgagaggcttctgagggaactctatttgtttgatgttctccgcgcagatcgaactactgctgcccatggtcttgaactgagagtcccatttctagatcatcgattttcttcctattacttgtctctgccaccagaaatgagaattccaaagaatgggatagaaaaacatctcctgagagagacgtttgaggattccaatctgatacccaaagagattctctggcgaccaaaagaagccttcagtgatggaataacttcagttaagaattcctggtttaagattttacaggaatacgttgaacatcaggttgatgatgcaatgatggcaaatgcagcccagaaatttcccttcaatactcctaaaaccaaagaaggatattactaccgtcaagtctttgaacgccattacccaggccgggctgactggctgagccattactggatgcccaagtggatcaatgccactgacccttctgcccgcacgctgacccactacaagtcagctgtcaaagcttaggtggtctttatgctgtaatgtgaaagcaaatatttcttcgtgttggatggggactgtgggtagataggggaacaatgagagtcaactcaggctaacttgggtgtgaaaaaaataaaagtcctaaatct

SEQ ID NO: 50 - DNA, 1599 bp, Homo sapiens
actcttgggaaaactgctgggcaccgtcgtcgcgctgaaggtggttctgtacctgctccgagtgtgcttagcgatggcctggaaatccggcggcgccagccactcggagctaatccacaatctccgcaaaaatggaatcatcaagacagataaagtatttgaagtgatgctggctacagaccgctcccactatgcaaaatgtaacccatacatggattctccacaatcaataggtttccaagcaacaatcagtgctccacacatgcatgcatatgcgctagaacttctatttgatcagttgcatgaaggagctaaagctcttgatgtaggatctggaagtggaatccttactgcatgttttgcacgtatggttggatgtactggaaaagtcataggaattgatcacattaaagagctagtagatgactcagtaaataatgtcaggaaggacgatccaacacttctgtcttcagggagagtacagcttgttgtgggggatggaagaatgggatatgctgaagaagccccttatgatgccattcatgtgggagctgcagcccctgttgtaccccaggcgctaatagatcagttaaagcccggaggaagattgatattgcctgttggtcctgcaggcggaaaccaaatgttggagcagtatgacaagctacaagatggcagcatcaaaatgaagcctctgatgggggtgatatacgtgcctttaacagataaagaaaagcagtggtccaggtggaagtgattttatcttctgctctttcttcttccacacatgcaagggatgaattgtaaaagcaacatcagcttgaccagtataaaattacagtggattgctcatctcagtcctcaaagctttttgaaaaccaacaccatcacagcttgttttggactttgttacactgttattttcagcatgaaaatgtgtgtttttttagggtttctgattcttcaaagaggcacagagccaaattggtagaggaaggatgcaaagtataaatttgtgtaatattactttaacatgcccatattttacttggaaatattaaaagaaagggttctgtaaaatggaaaacttagtttgtgaattgattttgaggagtggtttttcttttcttggacacttaattctgttctgatattaatttatcagattgcttttgtgcattggataacaccaccattcacaagttaagattcttggtatttggatatctgttagatgctactaagaaaatagagatgagctttctttttaaagcttttgatgtggtgtcatagaatagcatgttgtagatacaatcagctgctttgttaccttaaaactaggcatttgtaaatattaaaccttaagatggcaggtgatgtcctgtaaacactcagctgttcagattggacataactgacttagttcttcccttctctctctctcaaaattataggagacttgtagtttagtgtggttttctgtttctaatttgctgctgataatgtatatgaacttaacatgctgtgtaagctgtgtcctagttcttgaacagtttatgcagtgctgctttgccaaataaagttaaaagtaaaagaggc

SEQ ID NO: 51 - DNA, 6450 bp, Homo sapiens
gagttgtgcctggagtgatgtttaagccaatgtcagggcaaggcaacagtccctggccgtcctccagcacctttgtaatgcatatgagctcgggagaccagtacttaaagttggaggcccgggagcccaggagctggcggagggcgttcgtcctgggagctgcacttgctccgtcgggtcgccggcttcaccggaccgcaggctcccggggcagggccggggccagagctcgcgtgtcggcgggacatgcgctgcgtcgcctctaacctcgggctgtgctctttttccaggtggcccgccggtttctgagccttctgccctgcggggacacggtctgcaccctgcccgcggccacggaccatgaccatgaccctccacaccaaagcatctgggatggccctactgcatcagatccaagggaacgagctggagcccctgaaccgtccgcagctcaagatccccctggagcggcccctgggcgaggtgtacctggacagcagcaagcccgccgtgtacaactaccccgagggcgccgcctacgagttcaacgccgcggccgccgccaacgcgcaggtctacggtcagaccggcctcccctacggccccgggtctgaggctgcggcgttcggctccaacggcctggggggtttccccccactcaacagcgtgtctccgagcccgctgatgctactgcacccgccgccgcagctgtcgcctttcctgcagccccacggccagcaggtgccctactacctggagaacgagcccagcggctacacggtgcgcgaggccggcccgccggcattctacaggccaaattcagataatcgacgccagggtggcagagaaagattggccagtaccaatgacaagggaagtatggctatggaatctgccaaggagactcgctactgtgcagtgtgcaatgactatgcttcaggctaccattatggagtctggtcctgtgagggctgcaaggccttcttcaagagaagtattcaaggacataacgactatatgtgtccagccaccaaccagtgcaccattgataaaaacaggaggaagagctgccaggcctgccggctccgcaaatgctacgaagtgggaatgatgaaaggtgggatacgaaaagaccgaagaggagggagaatgttgaaacacaagcgccagagagatgatggggagggcaggggtgaagtggggtctgctggagacatgagagctgccaacctttggccaagcccgctcatgatcaaacgctctaagaagaacagcctggccttgtccctgacggccgaccagatggtcagtgccttgttggatgctgagccccccatactctattccgagtatgatcctaccagacccttcagtgaagcttcgatgatgggcttactgaccaacctggcagacagggagctggttcacatgatcaactgggcgaagagggtgccaggctttgtggatttgaccctccatgatcaggtccaccttctagaatgtgcctggctagagatcctgatgattggtctcgtctggcgctccatggagcacccagtgaagctactgtttgctcctaacttgctcttggacaggaaccagggaaaatgtgtagagggcatggtggagatcttcgacatgctgctggctacatcatctcggttccgcatgatgaatctgcagggagaggagtttgtgtgcctcaaatctattattttgcttaattctggagtgtacacatttctgtccagcaccctgaagtctctggaagagaaggaccatatccaccgagtcctggacaagatcacagacactttgatccacctgatggccaaggcaggcctgaccctgcagcagcagcaccagcggctggcccagctcctcctcatcctctcccacatcaggcacatgagtaacaaaggcatggagcatctgtacagcatgaagtgcaagaacgtggtgcccctctatgacctgctgctggagatgctggacgcccaccgcctacatgcgcccactagccgtggaggggcatccgtggaggagacggaccaaagccacttggccactgcgggctctacttcatcgcattccttgcaaaagtattacatcacgggggaggcagagggtttccctgccacagtctgagagctccctggctcccacacggttcagataatccctgctgcattttaccctcatcatgcaccactttagccaaattctgtctcctgcatacactccggcatgcatccaacaccaatggctttctagatgagtggccattcatttgcttgctcagttcttagtggcacatcttctgtcttctgttgggaacagccaaagggattccaaggctaaatctttgtaacagctctctttcccccttgctatgttactaagcgtgaggattcccgtagctcttcacagctgaactcagtctatgggttggggctcagataactctgtgcatttaagctacttgtagagacccaggcctggagagtagacattttgcctctgataagcactttttaaatggctctaagaataagccacagcaaagaatttaaagtggctcctttaattggtgacttggagaaagctaggtcaagggtttattatagcaccctcttgtattcctatggcaatgcatccttttatgaaagtggtacaccttaaagcttttatatgactgtagcagagtatctggtgattgtcaattcacttccccctataggaatacaaggggccacacagggaaggcagatcccctagttggccaagacttattttaacttgatacactgcagattcagagtgtcctgaagctctgcctctggctttccggtcatgggttccagttaattcatgcctcccatggacctatggagagcaacaagttgatcttagttaagtctccctatatgagggataagttcctgatttttgtttttatttttgtgttacaaaagaaagccctccctccctgaacttgcagtaaggtcagcttcaggacctgttccagtgggcactgtacttggatcttcccggcgtgtgtgtgccttacacaggggtgaactgttcactgtggtgatgcatgatgagggtaaatggtagttgaaaggagcaggggccctggtgttgcatttagccctggggcatggagctgaacagtacttgtgcaggattgttgtggctactagagaacaagagggaaagtagggcagaaactggatacagttctgagcacagccagacttgctcaggtggccctgcacaggctgcagctacctaggaacattccttgcagaccccgcattgcctttgggggtgccctgggatccctggggtagtccagctcttattcatttcccagcgtggccctggttggaagaagcagctgtcaagttgtagacagctgtgttcctacaattggcccagcaccctggggcacgggagaagggtggggaccgttgctgtcactactcaggctgactggggcctggtcagattacgtatgcccttggtggtttagagataatccaaaatcagggtttggtttggggaagaaaatcctcccccttcctcccccgccccgttccctaccgcctccactcctgccagctcatttccttcaatttcctttgacctataggctaaaaaagaaaggctcattccagccacagggcagccttccctgggcctttgcttctctagcacaattatgggttacttcctttttcttaacaaaaaagaatgtttgatttcctctgggtgaccttattgtctgtaattgaaaccctattgagaggtgatgtctgtgttagccaatgacccaggtagctgctcgggcttctcttggtatgtcttgtttggaaaagtggatttcattcatttctgattgtccagttaagtgatcaccaaaggactgagaatctgggagggcaaaaaaaaaaaaaaaagtttttatgtgcacttaaatttggggacaattttatgtatctgtgttaaggatatgcttaagaacataattcttttgttgctgtttgtttaagaagcaccttagtttgtttaagaagcaccttatatagtataatatatatttttttgaaattacattgcttgtttatcagacaattgaatgtagtaattctgttctggatttaatttgactgggttaacatgcaaaaaccaaggaaaaatatttagtttttttttttttttttgtatacttttcaagctaccttgtcatgtatacagtcatttatgcctaaagcctggtgattattcatttaaatgaagatcacatttcatatcaacttttgtatccacagtagacaaaatagcactaatccagatgcctattgttggatattgaatgacagacaatcttatgtagcaaagattatgcctgaaaaggaaaattattcagggcagctaattttgcttttaccaaaatatcagtagtaatatttttggacagtagctaatgggtcagtgggttctttttaatgtttatacttagattttcttttaaaaaaattaaaataaaacaaaaaaaatttctaggactagacgatgtaataccagctaaagccaaacaattatacagtggaaggttttacattattcatccaatgtgtttctattcatgttaagatactactacatttgaagtgggcagagaacatcagatgattgaaatgttcgcccaggggtctccagcaactttggaaatctctttgtatttttacttgaagtgccactaatggacagcagatattttctggctgatgttggtattgggtgtaggaacatgatttaaaaaaaaaactcttgcctctgctttcccccactctgaggcaagttaaaatgtaaaagatgtgatttatctggggggctcaggtatggtggggaagtggattcaggaatctggggaatggcaaatatattaagaagagtattgaaagtatttggaggaaaatggttaattctgggtgtgcaccaaggttcagtagagtccacttctgccctggagaccacaaatcaactagctccatttacagccatttctaaaatggcagcttcagttctagagaagaaagaacaacatcagcagtaaagtccatggaatagctagtggtctgtgtttcttttcgccattgcctagcttgccgtaatgattctataatgccatcatgcagcaattatgagaggctaggtcatccaaagagaagaccctatcaatgtaggttgcaaaatctaacccctaaggaagtgcagtctttgatttgatttccctagtaaccttgcagatatgtttaaccaagccatagcccatgccttttgagggctgaacaaataagggacttactgataatttacttttgatcacattaaggtgttctcaccttgaaatcttatacactgaaatggccattgatttaggccactggcttagagtactccttcccctgcatgacactgattacaaatactttcctattcatactttccaattatgagatggactgtgggtactgggagtgatcactaacaccatagtaatgtctaatattcacaggcagatctgcttggggaagctagttatgtgaaaggcaaataaagtcatacagtagctcaaaaggcaaccataattctctttggtgcaagtcttgggagcgtgatctagattacactgcaccattcccaagttaatcccctgaaaacttactctcaactggagcaaatgaactttggtcccaaatatccatcttttcagtagcgttaattatgctctgtttccaactgcatttcctttccaattgaattaaagtgtggcctcgtttttagtcatttaaaattgttttctaagtaattgctgcctctattatggcacttcaattttgcactgtcttttgagattcaagaaaaatttctattcatttttttgcatccaattgtgcctgaacttttaaaatatgtaaatgctgccatgttccaaacccatcgtcagtgtgtgtgtttagagctgtgcaccctagaaacaacatacttgtcccatgagcaggtgcctgagacacagacccctttgcattcacagagaggtcattggttatagagacttgaattaataagtgacattatgccagtttctgttctctcacaggtgataaacaatgctttttgtgcactacatactcttcagtgtagagctcttgttttatgggaaaaggctcaaatgccaaattgtgtttgatggattaatatgcccttttgccgatgcatactattactgatgtgactcggttttgtcgcagctttgctttgtttaatgaaacacacttgtaaacctcttttgcactttgaaaaagaatccagcgggatgctcgagcacctgtaaacaattttctcaacctatttgatgttcaaataaagaattaaact

SEQ ID NO: 52 - DNA, 1518 bp, Homo sapiens
ggccgctaggggtgcggggttggggaggaggccgctagtctacgcctgtggagccgatactcagccctctgcgaccatggctgtgctggcggcacttctgcgcagcggcgcccgcagccgcagccccctgctccggaggctggtgcaggaaataagatatgtggaacggagttatgtatcaaaacccactttgaaggaagtggtcatagtaagtgctacaagaacacccattggatcttttttaggcagcctttccttgctgccagccactaagcttggttccattgcaattcagggagccattgaaaaggcagggattccaaaagaagaagtgaaagaagcatacatgggtaatgttctacaaggaggtgaaggacaagctcctacaaggcaggcagtattgggtgcaggcttacctatttctactccatgtaccaccataaacaaagtttgtgcttcaggaatgaaagccatcatgatggcctctcaaagtcttatgtgtggacatcaggatgtgatggtggcaggtgggatggagagcatgtccaatgttccatatgtaatgaacagaggatcaacaccatatggtggggtaaagcttgaagatttgattgtaaaagacgggctaactgatgtctacaataaaattcatatgggcagctgtgctgagaatacagcaaagaagctgaatattgcacgaaatgaacaggacgcttatgctattaattcttataccagaagtaaagcagcatgggaagctgggaaatttggaaatgaagttattcctgtcacagttacagtaaaaggtcaaccagatgtagtggtgaaagaagatgaagaatataaacgtgttgattttagcaaagttccaaagctgaagacagttttccagaaagaaaatggcacagtaacagctgccaatgccagtacactgaatgatggagcagctgctctggttctcatgacggcagatgcagcgaagaggctcaatgttacaccactggcaagaatagtagcatttgctgacgctgctgtagaacctattgattttccaattgctcctgtatatgctgcatctatggttcttaaagatgtgggattgaaaaaagaagatattgcaatgtgggaagtaaatgaagcctttagtctggttgtactagcaaacattaaaatgttggagattgatccccaaaaagtgaatatcaatggaggagctgtttctctgggacatccaattgggatgtctggagccaggattgttggtcatttgactcatgccttgaagcaaggagaatacggtcttgccagtatttgcaatggaggaggaggtgcttctgccatgctaattcagaagctgtagacaacctctgctatttaaggagacaaccctatgtgaccagaaggcctgctgtaatcagtgtgactactgtgggtcagcttatattcagataagctgtttcattttttattattttctatgttaacttttaaaaatcaaaatgatgaaatcccaaaaca

SEQ ID NO: 53 - DNA, 1439 bp, Homo sapiens
ggctcgcctcggcgtgcagtgcgcgtgcgtggagctgggagctaggtcctcggagtgggccggagatggcggcggccgacggggctttgccggaggcggcggctttagagcaacccgcggagctgcctgcctcggtgcgggcgagtatcgagcggaagcggcagcgggcactgatgctgcgccaggcccggctggctgcccggccctactcggcgacggcggctgcggctactggaggcatggctaatgtaaaagcagccccaaagataattgacacaggaggaggcttcattttagaagaggaagaagaagaagaacagaaaattggaaaagttgttcatcaaccaggacctgttatggaatttgattatgtaatatgcgaagaatgtgggaaagaatttatggattcttatcttatgaaccactttgatttgccaacttgtgataactgcagagatgctgatgataaacacaagcttataaccaaaacagaggcaaaacaagaatatcttctgaaagactgtgatttagaaaaaagagagccacctcttaaatttattgtgaagaagaatccacatcattcacaatggggtgatatgaaactctacttaaagttacagattgtgaagaggtctcttgaagtttggggtagtcaagaagcattagaagaagcaaaggaagtccgacaggaaaaccgagaaaaaatgaaacagaagaaatttgataaaaaagtaaaagaattgcggcgagcagtaagaagcagcgtgtggaaaagggagacgattgttcatcaacatgagtatggaccagaagaaaacctagaagatgacatgtaccgtaagacttgtactatgtgtggccatgaactgacatatgaaaaaatgtgattttttagttcagtgacctgttttatagaattttatatttaaataaaggaaatttagattggtccttttcaaaattcaaaaaaaaaagcaacatcttcatagatgaatgaaacccttgtataagtaatacttcagtaataattatgtatgttatggcttaaaagcaagtttcagtgaaggtcacctggcctggttgtgtgcacaatgtcatgtctgtgattgccttcttacaacagagatgggagctgagtgctagagtaggtgcagaagtggtaggtcagctacaaatttgaggacaagataccaaggcaaaccctagattggggtagagggaaaagggttcaacaaaggctgaactggattcttaaccaagaaacaaataatagcaatggtggtgcaccactgtaccccaggttctagtcatgtgttttttaggacgatttctgtctccacgatggtggaaacagtggggaactactgctggaaaaagccctaatagcagaaataaacattgagttgtacgagtctgaaaaaaaaaaaaaaaaaaaaaaa

SEQ ID NO: 54 - DNA, 3857 bp, Homo sapiens
ggccgagcctcggcggcggcggtagcggcggcggcgacgctgacacctcccaccatggacagcttcgacttagccctgctccaggaatgggacctcgagtcactgtgtgtctatgaaccagatagaaatgcattacggaggaaagaacgagaaagaagaaatcaagaaactcaacaggatgatggcacgtttaattctagttactctctcttcagtgagccctacaagactaacaagggggatgaactctccaaccggatccagaacactttaggcaattatgatgaaatgaaagactttttaactgatagaaccaatcagagtcatctcgttggagttcccaaacctggggttcctcagactcctgtgaacaagatcgatgaacattttgttgcagattcaagagcccagaaccagccctcgtctatctgtagcactacaacttccacaccagcagctgtccccgtgcagcagagtaaaagaggcactatgggctggcagaaggctgggcacccaccctctgacggccaacagagagcaacacaacagggctctctcaggaccttgcttggagatggtgttggcagacagcagcctcgggccaaacaagtgtgcaatgtggaggtgggccttcagacccaggagaggccacctgccatggcggccaagcacagcagcagcggacactgtgttcagaactttcctccatccctagcttcaaaacccagcctggtccagcagaaaccgaccgcgtatgtgaggccaatggacggccaagatcaggcccctgatgagtctcctaagctgaagtcgtcttcggaaaccagcgtgcactgcacatcatacaggggagtccctgccagcaagccggagcctgccagagccaaggccaagctctccaagttcagcatccccaagcagggggaggagagtagatctggagaaaccaacagctgtgttgaagaaataatccgggagatgacctggcttccaccactttctgctattcaagcacctggcaaagtggaaccaaccaaatttccatttccaaataaggactctcagcttgtatcctctggacacaataatccaaagaaaggtgatgcagagccagagagtccagacaatggcacatcgaatacatcaatgctggaagatgaccttaagctaagcagtgatgaagaggagaatgaacagcaggcagctcagagaacggctctccgcgctctctctgacagcgccgtggtccagcagcccaactgcagaacctcggtgccttccagcaagggcagcagcagcagcagcagcagcggcacgagcagctcctccagcgactcagagagcagctccggatctgactcggagaccgagagcagctccagcgagagtgagggcagcaagcccccccacttctccagccccgaggctgaaccggcatcctctaacaagtggcagctggataaatggctaaacaaagttaatccccacaagcctcctattctgatccaaaatgaaagccacgggtcagagagcaatcagtactacaacccggtgaaagaggacgtccaggactgtgggaaagtccccgacgtttgccagcccagcctgagagagaaggagatcaagagcacttgcaaggaggagcaaaggccaaggacagccaacaaggcccctgggagtaaaggcgtgaagcagaagtccccgcccgcggccgtggccgtggcggtgagcgcagccgccccgccacccgcagtgccctgtgcgcccgcggagaacgcgcccgcgcctgcccggaggtccgcgggcaagaagcccaccaggcgcaccgagaggacctcagccggggacggcgccaactgccaccggcccgaggagcccgcggccgcggacgcgctggggacgagcgtggtggtccccccggagcccaccaaaaccaggccctgtggcaacaacagagcgagccaccgcaaggagctgcgctcctccgtgacctgcgagaagcgccgcacgcgggggctaagcaggatcgtccccaaatccaaggagttcattgagacagagtcgtcatcttcatcctcctcctcggactccgacctggagtccgagcaggaggagtaccctctgtccaaagcacagaccgtggctgcctctgcctcctccgggaatgatcagaggctgaaggaggccgctgccaacgggggcagtggtcctagggcccctgtaggctccatcaacgccaggaccaccagtgacatcgccaaggagctggaggagcagttctacacactggtcccctttggccggaacgaacttctctcccctctaaaggacagtgatgagatcaggtctctctgggtcaaaatcgacctgaccctcctgtccaggatcccagaacacctgccccaggagccaggggtattgagcgcccctgccaccaaggactctgagagcgcaccgcccagccacacctcggacacacctgcagaaaaggctttgccaaaatccaagaggaaacgcaagtgtgacaacgaagacgactacagggagatcaagaagtcccagggagagaaagacagctcttcaagactggccacctccaccagtaatactttgtctgcaaaccactgcaacatgaacatcaacagtgtggcaataccaataaataaaaatgaaaaaatgcttcggtcgcccatctcacccctctctgatgcatctaaacacaaatacaccagcgaggacttaacttcttccagccgacctaatggcaacagtttgtttacttcagcctcttccagcaaaaagcctaaggccgacagccagctgcagcctcacggcggagacctcacgaaagcagctcacaacaattctgaaaacattcccctccacaagtcacggccgcagacgaagccgtggtctccaggctccaacggccacagggactgcaagaggcagaaacttgtcttcgatgatatgcctcgcagtgccgattattttatgcaagaagctaaacgaatgaagcataaagcagatgcaatggtggaaaagtttggaaaggctttgaactatgctgaagcagcattgtcgtttatcgagtgtggaaatgcaatggaacaaggccccatggaatccaaatctccttattacctgatgtattcagaaacagtagagctcatcaggtatgctatgagactaaaaacccactcaggccccaatgccacaccagaagacaaacaactggctgcattatgttaccgatgcctggccctcctgtactggcggatgtttcgactcaaaagggaccacgctgtaaagtattcaaaagcactaatcgactatttcaagaactcatctaaagccgcccaagccccatctccgtggggggccagtggaaagagcactggaaccccatcccccatttctcccaacccctttcccggcagctccgtggggtctcagggcagcctctccaacgccagcgccctgtccccgtcgaccatcgtcagcatcccacagcgcatccaccagatggcggccaaccacgtcagcatcaccaacagcatcctgcacagctacgactactgggagatggccgacaacctggccaaggaaaaccgagaattcttcaacgacctggatctgctcatggggccggtcaccctgcacagcagcatggagcacctggtccagtactcccaacagggcctgcactggctgcggaacagcgcccacctgtcatagggacctcaccctggggccagagtgggctctggtctccacagatggctcaacgtttttggacactgtgctactgaaactcccagccacagcatttatagactgcggtgaacatttcctca

SEQ ID NO: 55 - DNA, 3285 bp, Homo sapiens
caccttctgcactgctcatctgggcagaggaagcttcagaaagctgccaaggcaccatctccaggaactcccagcacgcagaatccatctgagaatatgctgccacaaataccctttttgctgctagtatccttgaacttggttcatggagtgttttacgctgaacgataccaaatgcccacaggcataaaaggcccactacccaacaccaagacacagttcttcattccctacaccataaagagtaaaggtatagcagtaagaggagagcaaggtactcctggtccaccaggccctgctggacctcgagggcacccaggtccttctggaccaccaggaaaaccaggctacggaagtcctggactccaaggagagccagggttgccaggaccaccgggaccatcagctgtagggaaaccaggtgtgccaggactcccaggaaaaccaggagagagaggaccatatggaccaaaaggagatgttggaccagctggcctaccaggaccccggggcccaccaggaccacctggaatccctggaccggctggaatttctgtgccaggaaaacctggacaacagggacccacaggagccccaggacccaggggctttcctggagaaaagggtgcaccaggagtccctggtatgaatggacagaaaggggaaatgggatatggtgctcctggtcgtccaggtgagaggggtcttccaggccctcagggtcccacaggaccatctggccctcctggagtgggaaaaagaggtgaaaatggggttccaggacagccaggcatcaaaggtgatagaggttttccgggagaaatgggaccaattggcccaccaggtccccaaggccctcctggggaacgagggccagaaggcattggaaagccaggagctgctggagccccaggccagccagggattccaggaacaaaaggtctccctggggctccaggaatagctgggcccccagggcctcctggctttgggaaaccaggcttgccaggcctgaagggagaaagaggacctgctggccttcctgggggtccaggtgccaaaggggaacaagggccagcaggtcttcctgggaagccaggtctgactggaccccctgggaatatgggaccccaaggaccaaaaggcatcccgggtagccatggtctcccaggccctaaaggtgagacagggccagctgggcctgcaggataccctggggctaagggtgaaaggggttcccctgggtcagatggaaaaccagggtacccaggaaaaccaggtctcgatggtcctaagggtaacccagggttaccaggtccaaaaggtgatcctggagttggaggacctcctggtctcccaggccctgtgggcccagcaggagcaaagggaatgcccggacacaatggagaggctggcccaagaggtgcccctggaataccaggtactagaggccctattgggccaccaggcattccaggattccctgggtctaaaggggatccaggaagtcccggtcctcctggcccagctggcatagcaactaagggcctcaatggacccaccgggccaccagggcctccaggtccaagaggccactctggagagcctggtcttccagggccccctgggcctccaggcccaccaggtcaagcagtcatgcctgagggttttataaaggcaggccaaaggcccagtctttctgggacccctcttgttagtgccaaccagggggtaacaggaatgcctgtgtctgcttttactgttattctctccaaagcttacccagcaataggaactcccataccatttgataaaattttgtataacaggcaacagcattatgacccaaggactggaatctttacttgtcagataccaggaatatactatttttcataccacgtgcatgtgaaagggactcatgtttgggtaggcctgtataagaatggcacccctgtaatgtacacctatgatgaatacaccaaaggctacctggatcaggcttcagggagtgccatcatcgatctcacagaaaatgaccaggtgtggctccagcttcccaatgccgagtcaaatggcctatactcctctgagtatgtccactcctctttctcaggattcctagtggctccaatgtgagtacaccccacagagctaatctaaatcttgtgctagaaaaagcattctctaactctaccccaccctacaaaatgcatatggaggtaggctgaaaagaatgtaatttttattttctgaaatacagatttgagctatcagaccaacaaaccttccccctgaaaagtgagcagcaacgtaaaaacgtatgtgaagcctctcttgaatttctagttagcaatcttaaggctctttaaggttttctccaatattaaaaaatatcaccaaagaagtcctgctatgttaaaaacaaacaacaaaaaacaaagcaacaaaaaaaaaaattaaaaaaaaaaacagaaatagagctctaagttatgtgaaatttgatttgagaaactcggcatttcctttttaaaaaagcctgtttctaactatgaatatgagaacttctaggaaacatccaggaggtatcatataactttgtagaacttaaatacttgaatattcaaatttaaaagacactgtatcccctaaaatatttctgatggtgcactactctgaggcctgtatggcccctttcatcaatatctattcaaatatacaggtgcatatatacttgttaaagctcttatataaaaaagccccaaaatattgaagttcatctgaaatgcaaggtgctttcatcaatgaaccttttcaaaacttttctatgattgcagagaagctttttatatacccagcataacttggaaacaggtatctgacctattcttatttagttaacacaagtgtgattaatttgatttctttaattccttattgaatcttatgtgatatgattttctggatttacagaacattagcacatgtaccttgtgcctcccattcaagtgaagttataatttacactgagggtttcaaaattcgactagaagtggagatatattatttatttatgcactgtactgtatttttatattgctgtttaaaacttttaagctgtgcctcacttattaaagcacaaaatgttttacctactccttatttacgacacaataaaataacatcaatagatttttaggctgaattaatttgaaagcagcaatttgctgttctcaaccattctttcaaggcttttcattcgacacaataaaataacatcaatag

SEQ ID NO: 56 - DNA, 5341 bp, Homo sapiens
gcgagacgccctctctcttccagccgcagccgcgttgcgggttcttccctgtggaacagtagagacctagtctgccttctttcacaagataatccttcaattatttgaaggtgattattcagcatatatctcttgagtacctgtgcatgcaagacactgtcctggatattgtgagagatccaaagtttagtatgagatcattttcccttgcctgagttttgagctgattgagaaataagaacctacagatgaagaagcaagacagtacctttaaaaaaattagctttttattcagattctctttgtggccagatgggtttgtatggacaggcttgtccatctgtaacttcattaaggatgacatctgaactggagagcagcctaacgtctatggactggttaccacagctcaccatgagagcagccatccaaaaatctgatgctacacaaaatgcacatggaacaggaatttctaagaagaatgcactccttgacccaaatacaactctggaccaggaagaagtccaacagcacaaagatgggaaacctccatacagttatgccagcctcattacatttgcaattaatagctcacccaaaaagaaaatgactttaagtgaaatttatcagtggatttgtgataacttcccatattatagagaggctggcagtggttggaagaattccatacgacataatctgtcattgaacaaatgtttccttaaagtgcctcgatctaaggatgaccctggaaaggggtcctactgggcaatagacaccaatccgaaggaagatgcgctgcctactcggccaaagaagagggcacgatctgtagaacgggcctcaactccatatagcatagattcagattctttgggaatggagtgtattatttcgggaagtgcctctccaactctggcaatcaacactgtgactaacaaagtaacattgtataacactgatcaggatggtagtgatagcccacgcagtagccttaacaacagtctctcagaccagagtttggcatctgttaatttgaacagtgttggaagtgtgcatagttatacaccggtgacaagccatccagaatcagtctctcaatcattaactcctcagcagcaaccacagtacaaccttccagaaagagacaagcaactacttttctcagaatataattttgaagatcttagtgcctcatttcggagcctttataagtcagtttttgagcagtcacttagtcaacaaggtttgatgaacatcccttctgaatcttcccagcagtcccacacttcatgtacctatcagcactctcccagcagtacagtgagcactcacccacacagcaaccaaagcagcctgtccaacagtcatggcagtggcctcaacaccacaggcagtaattcggttgcacaggtctcactgtctcacccccagatgcacccacagccatctccacatcctccccatcgaccgcatggtttaccgcagcatccgcagcgttccccacacccagcaccacacccacagcaacacagccagctccagtcccctcacccccagcatccctctccacatcaacacatacagcaccatccgaaccatcagcatcagacgttaacacatcaggcacccccacccccacaacaggtatcctgtaattctggtgtttcaaatgattggtatgcgacacttgatatgctaaaagaaagctgtcgaattgccagcagtgttaattggtcagatgtagacctttcacagtttcaaggtctgatggagagtatgagacaggcagatctcaagaactggtctttagaccaggttcagtttgccgatctttgttcttctcttaatcagttctttacacaaactggccttatacattcacagagtaatgttcaacaaaatgtttgtcatggtgccatgcatccaacaaaaccttcccaacacattggaacaggaaatttgtacatagattctaggcaaaatctccctccttcagtgatgccaccccctggttatcctcatatcccacaggcactcagcactccaggaacaacgatggcaggccatcacagagccatgaaccagcagcacatgatgccttcccaagccttccagatgcggcgttccctgcctccagatgacatccaggatgactttgattgggattcaattgtgtagggcttgtttctgcaagacaccagaccctaacgttacctttctgtgcagtgaagggaaaggtttaagagaatccagttgagaaaacaaacttgctaatcactttaccaatgttatcaaaattacttttgaagacaatcagaaggattttagctggataacttactgcttttatctgacccaagcaagtactacatgtttgtctccctgccagctgccctatgtagctcctaactgttgtgtgatttggacggctttttgcatatttgtgtcagtttgatgttaaccacaagtgccagactgatttttcagacggagcctattttgctgcaagcagtttatataaagatacatatgtgtaaatatatgtacaaaaattactgaaaggcttcagttttttctaattggattattatgtcttgaaagttattgtcagtttttattccttgttaggctattttctgcaggatgcttttaactgatgtaggaaactgaaaggaaatagattttttccaaaacccagttccccttatttaatcttttttagaaatgtgggtaatgaattctatctaataagtcaaggaaaccagaatttgacacactccaacaatccaaaggggcatgttgctcctgagcagcatgaagaactgaccaaattggttttgatgcttgggggatcatagagtatttatgtctgcttttctaaatctgcattataatagctctaaaatttgttgattggtaagaaattgggcattgcttggctctttaaacacatcagtgcttccacattcacctatgtatttattattcaaaagtgtcattttaatatttattgctaccttctgtgaatgcttagctcctgtcgggttcattaaggagaaatgtgtctgaaagcacagaactattattatttttttctttttttgagatggagtcttgccctgttgcccaggctggagtgcagtggcacgatctcggctcactgcaacctccgcctcccgggttcaagcaattctcctgcctcagcctcccgagtagctgggagtgcaggtgcacaccgccatgcctggctgattttttgtattttagtagagatggggtttcaccatgttgcctgggctggttgcaaactcttgagctcaggcagtctgcctgcctcagcctcctagagtgctgggattacagacatgagccactgcgcctggcccagcgttacttttcttgataagaatttacagataagacactcagagagacattgtgtcattctctatcatcactccttttaccatgtgaatagatttctctgtcttggcattcttgctgattcagacttattagttaaatcggatttttctggaatttgaatcagatttcatttgggcaacaacagcagggcagggtttctaaagcaggtttccccactcatctaggttgtcttgaaaggaggatagagccacttacagttttatttgcttcagtgtttaatgtagatattatgtggcctgctgtttctgttgtcttgtatgtctgtgtatgcatgacatttggtccctttctttgaaatgcagcccctcttacgggttttttagtggtggtagtttgttttgtttcatatcatatcacagtttgcatggactgattatcttagttttatgataaaactagaagaaatgagggttttttttaatgaatagattttgaattgattctttagaccccccaaaaagtgtcagttctaatggggaaatatattccatcaagtcaaagagtaataactgctcactagttgctttttagcatctctggtcttatcagccatgctaaatcactttaattagccttagtgattctgtggttgagtaatctctacttgaactaaacaaacatcttttgtttctgtgtgtgtgtgctgtgtgtgagagtgtgcgcgcgcgtgtgtgtgtgtgtgttttaatggagtgttgccttgaatgaatcactgggaagccagccatggtaagggctggtgaggttggggagaaaggaagagctttatgtttctctgttgtttggaccctacttggcatgaaaaaggaagctcagttccagccccttggatcaacgaaaatcagaggattctggaaaggcagccaacttgcgcctcttagaaggatcagaggcaagatgagatggcagcctgcagagtaaatgcttgaaaaaagaggggtgattttcaatggtttgcttaagtcactgttttctagacaccaaaatagctgttttgaaactgttttaattgcttgggtagcaatgtgcactttaaacaatttggatattggaatgcagtctcatactgagtgatttgagtagaaccactgatgatgattttataaattgtgtgaagcgaatttcccatttggcaatcatttactgatttgcagtgatgaatatttttatgagaatttaaacttagcaagaatggccatggaggcaaagccttcacccagacccatcccactctcctgtgatccaggtggtccaggagcccaggacaggccttttctgtgggccctggccagacagggttacctggtgaggtgcagagagtccctctagtggccattttgtatggtagttgctaatgcagaacaagttctgtcttgggcttaaattgactgaagactttagggggaaagaatagtaaatgcatgtaaacaaatggggacactctgttcaggagaataatccgactggcatttgtggcagtttttgaaatgtaaatgtattcatgtgtgttcttgtaaatacgtgtcgctcagatgtcctttgaagtgggagggaatcaatccggggataatttcaaatggaatagagtattttgatattgttcattcagagggtgatgtgtacatatctatattgtatatatgtgatgaaaatgcattggctttttgtgcagatacaacctgctctctgtactgctgttggacagtcagtgttttaatgtttctacagttttgctattgcacgatttcatattttgcctctatgatgaacggcaaccattatttgtaactgtttagtgctgtaaagaaatattccaagtgtcattaggattgttgctgccagaactgatatgcatgaatggcacttaaaataaatatattatgttaactct

SEQ ID NO: 57 - DNA, 1561 bp, Homo sapiens
cgcacgccacccgcccgccgcctgccagagctgctcggcccgcagccagggggacagcggctggtcggaggctcgcagtgctgtcggcgagaagcagtcgggtttggagcgcttgggtcgcgttggtgcgcggtggacacgagggaccccagttcccgcgagcagctccgcgccggccctgagagactaagctgaaactgctgctcagctcccaagatggtgccacccaaattgcatgtgcttttctgcctctgcggctgcctggctgtggtttatccttttgactggcaatacataaatcctgttgcccatatgaaatcatcagcatgggtcaacaaaatacaagtactgatggctgctgcaagctttggccaaactaaaatcccccggggaaatgggccttattccgttggttgtacagacttaatgtttgatcacactaataagggcaccttcttgcgtttatattatccatcccaagataatgatcgccttgacaccctttggatcccaaataaagaatatttttggggtcttagcaaatttcttggaacacactggcttatgggcaacattttgaggttactctttggttcaatgacaactcctgcaaactggaattcccctctgaggcctggtgaaaaatatccacttgttgttttttctcatggtcttggggcattcaggacactttattctgctattggcattgacctggcatctcatgggtttatagttgctgctgtagaacacagagatagatctgcatctgcaacttactatttcaaggaccaatctgctgcagaaataggggacaagtcttggctctaccttagaaccctgaaacaagaggaggagacacatatacgaaatgagcaggtacggcaaagagcaaaagaatgttcccaagctctcagtctgattcttgacattgatcatggaaagccagtgaagaatgcattagatttaaagtttgatatggaacaactgaaggactctattgatagggaaaaaatagcagtaattggacattcttttggtggagcaacggttattcagactcttagtgaagatcagagattcagatgtggtattgccctggatgcatggatgtttccactgggtgatgaagtatattccagaattcctcagcccctcttttttatcaactctgaatatttccaatatcctgctaatatcataaaaatgaaaaaatgctactcacctgataaagaaagaaagatgattacaatcaggggttcagtccaccagaattttgctgacttcacttttgcaactggcaaaataattggacacatgctcaaattaaagggagacatagattcaaatgcagctattgatcttagcaacaaagcttcattagcattcttacaaaagcatttaggacttcataaagattttgatcagtgggactgcttgattgaaggagatgatgagaatcttattccagggaccaacattaacacaaccaatcaacacatcatgttacagaactcttcaggaatagagaaatacaattaggattaaaataggtttttta

SEQ ID NO: 58 - DNA, 863 bp, Homo sapiens
ccagcggctgcggcggcggagctcctccgaggtccgggtcaccagtctctgctcttcccagcctctccggcgcgctccaagggcttcccgtcgggaccatgcgcggccgtgagctcccgctggtcctgctggcgctggtcctctgcctggcgccccgggggcgagcggtcccgctgcctgcgggcggagggaccgtgctgaccaagatgtacccgcgcggcaaccactgggcggtggggcacttaatggggaaaaagagcacaggggagtcttcttctgtttctgagagagggagcctgaagcagcagctgagagagtacatcaggtgggaagaagctgcaaggaatttgctgggtctcatagaagcaaaggagaacagaaaccaccagccacctcaacccaaggccctgggcaatcagcagccttcgtgggattcagaggatagcagcaacttcaaagatgtaggttcaaaaggcaaagttggtagactctctgctccaggttctcaacgtgaaggaaggaacccccagctgaaccagcaatgataatgatggcctctctcaaaagagaaaaacaaaacccctaagagactgcgttctgcaagcatcagttctacggatcatcaacaagatttccttgtgcaaaatatttgactattctgtatctttcatccttgactaaattcgtgattttcaagcagcatcttctggtttaaacttgtttgctgtgaacaattgtcgaaaagagtcttccaattaatgcttttttatatctaggctacctgttggttagattcaaggccccgagctgttaccattcacaataaaagcttaaacacattgtccaaaaaaaaaaaaaaaaaa

SEQ ID NO: 59 - DNA, 3052 bp, Homo sapiens
caggaccatggaactcagcgtcctcctcttccttgcactcctcacaggactcttgctactcctggttcagcgccaccctaacacccatgaccgcctcccaccagggccccgccctctgccccttttgggaaaccttctgcagatggatagaagaggcctactcaaatcctttctgaggttccgagagaaatatggggacgtcttcacggtacacctgggaccgaggcccgtggtcatgctgtgtggagtagaggccatacgggaggcccttgtggacaaggctgaggccttctctggccggggaaaaatcgccatggtcgacccattcttccggggatatggtgtgatctttgccaatggaaaccgctggaaggtgcttcggcgattctctgtgaccactatgagggacttcgggatgggaaagcggagtgtggaggagcggattcaggaggaggctcagtgtctgatagaggagcttcggaaatccaagggggccctcatggaccccaccttcctcttccagtccattaccgccaacatcatctgctccatcgtctttggaaaacgattccactaccaagatcaagagttcctgaagatgctgaacttgttctaccagactttttcactcatcagctctgtattcggccagctgtttgagctcttctctggcttcttgaaatactttcctggggcacacaggcaagtttacaaaaacctgcaggaaatcaatgcttacattggccacagtgtggagaagcaccgtgaaaccctggaccccagcgcccccaaggacctcatcgacacctacctgctccacatggaaaaagagaaatccaacgcacacagtgaattcagccaccagaacctcaacctcaacacgctctcgctcttctttgctggcactgagaccaccagcaccactctccgctacggcttcctgctcatgctcaaataccctcatgttgcagagagagtctacagggagattgaacaggtgattggcccacatcgccctccagagcttcatgaccgagccaaaatgccatacacagaggcagtcatctatgagattcagagattttccgaccttctccccatgggtgtgccccacattgtcacccaacacaccagcttccgagggtacatcatccccaaggacacagaagtatttctcatcctgagcactgctctccatgacccacactactttgaaaaaccagacgccttcaatcctgaccactttctggatgccaatggggcactgaaaaagactgaagcttttatccccttctccttagggaagcggatttgtcttggtgaaggcatcgcccgtgcggaattgttcctcttcttcaccaccatcctccagaacttctccatggccagccccgtggccccagaagacatcgatctgacaccccaggagtgtggtgtgggcaaaatacccccaacataccagatccgcttcctgccccgctgaaggggctgagggaagggggtcaaaggattccagggtcattcagtgtccccgcctctgtagacaatggctctgactccccgcaacttcctgcctctgagagacctgctacaagccagcttccttcccctccatggcaccagttgtctgaggtcacattgcaagtgagtgcaggagtgagattatcgaaaattataatatacaaaatcatatatatatatatgttcttgttttttgagacagagtctcacactgttgcccaggctggagtgcagtggcgtgatctcggctcactgcaacctccacccccggggatcaagcaactctcctgcctcagcctccctagtagctgggattacaggcatgcactaccacgcttggctaatttttgtatttttagtagagatggggtttcactgtgtaggccaggctggtctcgaactcctgaactcaagtgattcacccaccttagcctcccaaagtgctgggattacaggcgtgagtcaccgtgcccagccatgtatatatataattttaaaaattaagctgaaattcacataacataaaattagctgttttaaagtgtaaaatttagtggcgtgtggttcattcacaaagctgtacaaccaccaccatctagttccaaacattttctttttttctgagatggagtctcactctgtcacccaggttcgagttcagtggtgccatctctgtccactgcaacctccacatcctgggttcaagtgattctcctgcctcagcctctggaggagctggtatcacaggcgtcccccaccacgcctggctaaattttgtatttttaggtggtcttgaactcctgatgtcaggtgattctcctagctccaaatgttttcattatctctcccccaacaaaacccatacctatcaagctgtcactccccataccccattctctttttcatctcggcccctgtcaatctggtttttgtcactatggacttaccaattctgaatatttcccataaacagaatcatacaatatttgattttttttttttttttgaaactaagccttgctctgtctcccaggctggagtgctatggtgcaatttttgttcactgcaacctctgccttccaagatcaagagattctccagtctcagctcccaagtagctgggattacaggcatgtactaccatgcctggctaattttcttgtagttttagtagggacatgttggccaggctggtggtgagctcctggcctcaggtgatccacccacctcagtgttccaaagtgctgatattacaggcataatatgtgatcttttgtgtctggttgctttcatgttgaatgctatttttgaggttcatgcctgttgtagaccacagtcacacactgctgtagtcttccccagtcctcattcccagctgcctcttcctactgcttccgtctatcaaaaagcccccttggcccaggttccctgagctgtgggattctgcactggtgctttggattccctgatatgttccttcaaatctgctgagaattaaataaacatctctaaagcctgacctccccacgtc

SEQ ID NO: 60 - DNA, 1789 bp, Homo sapiens
tcgatgctccacgtaggagctggctcggctgccggctgcggtcagggccaccgtataaagagggcggcagacccgagcgcctaggactcgccgctgcccgcgccccgccgccgctgctgcccccagccccggccccaggcgtcccagccatggtccgcccaatgctcttgctcagcctcggcctcctggctggtctgctgccggcgctggccgcctgcccccagaactgccactgccacagcgacctgcagcacgtcatctgcgacaaggtggggctgcagaagatccccaaggtgtcagagaagaccaagctgctcaacctacagcgcaacaacttcccggtgctggctgccaattcgttccgggccatgccgaacctcgtgtcattgcacctgcagcactgccagatccgcgaggtggccgccggtgccttccgcggcctcaagcaacttatctacttgtacctgtcccataacgacatccgcgtcgtgcgtgccggtgccttcgacgacctgaccgagctgacctacctctacctggaccacaacaaggtcactgagctgccccgggggttgctctccccgctggtcaacctcttcatcttgcagctcaacaacaacaagatccgtgagctgcgcgcagggcccttccagggagccaaggacctgcgctggctctacctgtcggaaaacgcgttgagctccctgcagcccggggccctggacgacgtggagaacctcgccaaattccacgtggacaggaaccagctgtccagctacccctcagctgccctgagcaagctacgggtggtggaggagctgaagctgtcccacaaccccctgaaaagcatcccggacaatgccttccagtcctttggcagatacctggagaccctctggctggacaacaccaacctggagaagttctcagatggtgccttcctgggtgtaaccacgctgaaacacgtccatttggagaacaaccgcttgaaccagctaccctcgaacttccccttcgacagcctggagaccctcgcccttaccaataacccctggaagtgtacctgccagctccggggccttcggcggtggctggaagccaaggcctcccgcccagatgccacctgtgcctcacctgccaagttcaagggccagcacatccgtgacacggacgccttccgcagctgcaagttccccaccaagaggtccaagaaagctggccgccattaaacaggttctgacccagccagtcctggtgactggcctctgccttccaccggagagactactgaccttctcacctccgacccataccttctccccacagcctctgctgatgcacagagctgcctacacctagacacgtcctggcagggggcctcgggcactccactaccaacccagctccacccagcagtgtcctggggagaaggaaggctgagcctctccccagccttcatgccttccccaccctccagctcctcttggagaagctgttgctgagaccccccccccccccccaagtcaatcagaaccacaacaggttggtcatcaggatggccaccctcccaggatcatccttcctctgttctctttccctgccacgtggaaacaatcatcagatccttgccccaccccttgcttccagaaagggttttaaagcccatgccccaactctgccagcccccacctgccaggacgttctagcaggtcatcggtgctttgctgtccatcttcccatgctgcaatttcttcctgagatttctataaatataaatgtatgtatgtat

SEQ ID NO: 61 - DNA, 3164 bp, Homo sapiens
cacatttcttagcttctctgagcctccatttcagcatctgtaaaatgttactacctactttataggttttctgatgaggcttaagtgtggttgtgcatgtgaccatcttagcatagtgtgtggcaatggtaagcactcagtgctgtcagctgtttttaccgctgttattatattactgtgttttcccatgtcattaggtctgtgatccaggcttcagcagacaatccaggctgatgcttttgctgagtgcgctaagggatgctggcctggcgggatggtgaactggaagcagaaacgtcatcctctctcttccttcttgccatgcaggtgtggatgtgtgggggccgcatggaggacatcccctgctccagggtgggccatatctacaggaagtatgtgccctacaaggtcccggccggagtcagcctggcccgggtaagaaccttaagcgggtggccgaagtgtggatggatgagtacgcagagtacatttaccagcgccggcctgaataccgccacctctccgctggggatgtcgcagtccagaaaaagctccgcagctcccttaactgcaagagtttcaagtggtttatgacgaagatagcctgggacctgcccaaattctacccacccgtggagcccccggctgcagcttggggggagatccgaaatgtgggcacagggctgtgtgcagacacaaagcacggggccttgggctccccactaaggctagagggctgcgtccgaggccgtggggaggctgcctggaacaacatgcaggtattcaccttcacctggagagaggacatccggcctggagacccccagcacaccaagaagttctgctttgatgccatttcccacaccagccctgtcacgctgtacgactgccacagcatgaagggcaaccagctgtggaaataccgcaaagacaagaccctgtaccaccctgtcagtggcagctgcatggactgcagtgaaagtgaccataggatcttcatgaacacctgcaacccatcctctctcacccagcagtggctgtttgaacacaccaactcaacagtcttggaaaaattcaataggaactgagccctcatgtccccttggcaggccccccagggtctggcactcactgcagacttcctctttcaagggaggcagggcccctgtgggcactaggtgtaaaaggtgctggccaaatggttcagggtgaagagggctcttgattcaggggctggggtctgcctggtccttgagcccctgagttgtgggggtagggtgaagagcatatcccacaagaggccccacagggagcagagactgctttaatccctgctgacatcacggaaaagcaacagagccttttcaactttgtcactatgtccccttgaacattatgtgggagaacaccaaggtagcctaggccacccaaaagtgagtcctgcgaggttgcccagccctcagatggctctcctacatgatggtgctttagaaacaaaggtaaaatttgcctgtttggggcagcttttagtatcgatgccactcatctgcagcagaagagaaagaagtcctcttggggctttttagtttctgccgtcctggggggaacattgcagttactgcacagcttctgttctctgtcacaaccccaggtgatttggtccggtcaaaggccatacttggggccctaagagtgttcagtattgaatgctgatcagctgccaggtgaggagtcagaagagggagcccccctagacatttctttgcagctatggacatgcgggatatctccccctgctctctgggtatttgaaatgtcaattttagcactctccaggcacaaggacagcccagcaccagctttacagggcagtgtttcagatggccctgagcccacggaaaaggccaggtagacctccaaactagaaatgctggctgatttgccctgatccatgcttccatttccctgtctctcttccccaggcaattactggcctcaaaagaggaacagaggtgctgcgaggtgctcacctcacagagtctggaggcctccaggatcaactgtgggcaaagtgcctgcctctgacctcatcatggttctagttctcatacagaactccagaatttttaaagaactctataattggattgcaaactaggatgctacataggattctggtattccacatccaatatggatttctagaatgctgtgattaaaggagccagccaggtgtaatacagtcaaggcagcccccagcctagagacaatctgtgaaatccaaagttggtggtgttgggaaagcagggggacatgtgtccctcagctcagcagaggctgtggtacaacatggtccttggtgaagacctgcacccctggaacctcccaccatcatcacaactgtagtctcatttgcagtggagaaaagaacccgacgtcccacagccagatatacacccagctccatgccagcccttcatgtttaccttttgctttgttaattacatgtcagactcctagagggcctccagactaataggaagcatttctgtaaccaacctgccacccactgattcagaaatggaaatcacattccacaatctatggcttccaccagctagcccaggaaatacttgaaatcagcattccaattagtgttgagtctcttgattgtgtcatttaccaattaaataactgagacctaagtctgggaacagagccacgaatctgcctttgagatgctggcagatctcaaggccatcaattattgggggagggagggacaaacactcccaatcatccaccagtcagactgaatgtgtagctggcgaggaattacttccacttctggcccagcacaagccctgctttggccacctgtctgcaagagaggcggcccctgtgcttgcaacgcttacgtgttgatcccagtgtccttttccaaatgagtgctgtagctttagaagtggccctctatagaaagaagtcaaaagatgaggccccttctagaatctaggataacaagagtgttgacagtttgaggagtcgaattgagattcatcatcaaagagcaatgcagcgtcgttaaaataaaaactgtgccttttaaaaagaaaaatgcaaatatagagcaaatccctaaacttgaaaaaaaaaaaaaaaaa

SEQ ID NO: 62 - DNA, 1121 bp, Homo sapiens
ctagctctgtgggaaggttttgggctctctggctcggattttgcaatttctccctggggactgccgtggagccgcatccactgtggattataattgcaacatgacgctggaagagctcgtggcgtgcgacaacgcggcgcagaagatgcagacggtgaccgccgcggtggaggagcttttggtggccgctcagcgccaggatcgcctcacagtgggggtgtacgagtcggccaagttgatgaatgtggacccagacagcgtggtcctctgcctcttggccattgacgaggaggaggaggatgacatcgccctgcaaatccacttcacgctcatccagtccttctgctgtgacaacgacatcaacatcgtgcgggtgtcgggcaatgcgcgcctggcgcagctcctgggagagccggccgagacccagggcaccaccgaggcccgagacctccactgtcttcccttcctacagaaccctcacacggacgcctggaagagccacggcttggtggaggtggccagctactgcgaagaaagccggggcaacaaccagtgggtcccctacatctctcttcaggaacgctgaggcccttcccagcagcagaatctgttgagttgctgccaacaaacaaaaaatacaataaatatttgaaccccctcccccccagcacaacccccccaaaacaacccaacccacgaggaccatcgggggcaggtcgttggagactgaagagaaagagagagaggagaagggagtgaggggccgctgccgccttccccatcacggagggtccagactgtccactcgggggtggagtgagactgactgcaagccccaccctccttgagactggagctgagcgtctgcatacgagagacttggttgaaacttggttggtccttgtctgcaccctcgacaagaccacactttgggacttgggagctggggctgaagttgctctgtacccatgaactcccagtttgcgaattaataagagacaatctattttgttacttgcacttgttattcgaaccactgagagcgagatgggaagcatagatatctatatttttatttctactatgagggccttgtaataaatttctaaagcctcaaaaaa

SEQ ID NO: 63 - DNA, 1258 bp, Homo sapiens
gacataaaaaccgggtgccggcaggcgccagtcgcaggtgtgctgctgaggcgtgagaatggcgtcccgcggccggcgtccggagcatggcggacccccagagctgttttatgacgagacagaagcccggaaatacgttcgcaactcacggatgattgatatccagaccaggatggctgggcgagcattggagcttctttatctgccagagaataagccctgttacctgctggatattggctgtggcactgggctgagtggaagttatctgtcagatgaagggcactattgggtgggcctggatatcagccctgccatgctggatgaggctgtggaccgagagatagagggagacctgctgctgggggatatgggccagggcatcccattcaagccaggcacatttgatggttgcatcagcatttctgctgtgcagtggctctgtaatgctaacaagaagtctgaaaaccctgccaagcgcctgtactgcttttttgcttctcttttttctgttctcgtccggggatcccgagctgtcctgcagctgtaccctgagaactcagagcagttggagctgatcacaacccaggccacaaaggcaggcttctccggtggcatggtggtagactaccctaacagtgccaaagcaaagaaattctacctctgcttgttttctgggccttcgacctttataccagaggggctgagtgaaaatcaggatgaagttgaacccagggagtctgtgttcaccaatgagaggttcccattaaggatgtcgaggcggggaatggtgaggaagagtcgggcatgggtgctggagaagaaggagcggcacaggcgccagggcagggaagtcagacctgacacccagtacaccggccgcaagcgcaagccccgcttctaagtcaccacgcggttctggaaaggcacttgcctctgcacttttctatattgttcagctgacaaagtagtattttagaaaagttctaaagttataaaaatgttttctgcagtaaaaaaaaagttctctgggccgggcgtggtggctcacacctgtaatcccagcaccttgggaggctgaggtgggaggatcatttgaggccaggagtttgagacctgcctgggcaacataatgaaacttcctttccagggaggaaaaaaaaaaaaaaaaaaagctctgagagcatcttattttgtttaaaggcaagaaataaaatttccttttgtggaaaaaaaaaaaaaaaaaaaaaaaaaaaaa

SEQ ID NO: 64 - DNA, 2668 bp, Homo sapiens
atggcggcgggtgggagcggcgggcgtgcgtcgtgcccgccgggggtcggggtcggcccgggcacggggggcagtcccgggcccagcgccaacgccgccgccaccccggcccccggcaacgcggccgccgccgccgccgccgccgccgccgccgccgccgcccctgggccgacgccgcccgccccgccgggccccgggacagacgcgcaggccgcgggcgcggagcgggcggaggaggcggcgggcccgggggcggcggcgctgcagcgcgaggccgcgtacaactggcaggccagcaagcccaccgtgcaggagcgcttcgccttcctcttcaacaacgaggtgctgtgcgacgtgcacttcctggtgggcaaggggctcagctcgcagcgcatccccgcgcacaggttcgtgctggccgtgggcagcgccgtctttgatgccatgttcaacgggggaatggccacaacatccacggagattgagctgcccgacgtggaacccgccgccttcctcgcactgctcaagtttctctactcggacgaggtgcagattggcccggagacggtgatgaccacgctatacaccgccaagaagtacgcggtgccagcgctcgaggcccattgcgtggagttcctgaagaagaacctgcgagccgacaacgccttcatgctgctcacgcaggcgcgactcttcgatgaaccgcagctggccagcctgtgcctggagaacatcgacaaaaacactgcagacgccatcaccgcggagggcttcaccgacattgacctggacacgctggtggctgtcctggagcgcgacacactgggcatccgtgaggtgcggctgttcaatgccgttgtccgctggtccgaggccgagtgtcagcggcagcagctgcaggtgacgccagagaacaggcggaaggttctgggcaaggccctgggcctcattcgcttcccgctcatgaccatcgaggagttcgctgcaggtcccgcacagtcgggcatcctggtggaccgcgaggtggtcagcctcttcctgcacttcaccgtcaaccccaagccacgagtggagttcattgaccggccccgctgctgcctgcgtgggaaggagtgcagcatcaaccgcttccagcaggtggagagtcgctggggctacagcgggaccagtgaccgcatcaggttctcagtcaacaagcgcatcttcgtggtgggatttgggctgtatggatccatccacgggcccaccgactaccaagtgaacatccagattattcacaccgatagcaacaccgtcttgggccagaacgacacgggcttcagctgcgacggctcagccagcaccttccgcgtcatgttcaaggagccggtggaggtgctgcccaacgtcaactacacggcctgtgccacgctcaagggcccagactcccactacggcaccaaaggcctgcgcaaggtgacacacgagtcgcccaccacgggcgccaagacctgcttcaccttttgctacgcggccgggaacaacaatggcacatccgtggaggacggccagatccccgaggtcatcttctacacctaggctgcccgacaccgacaccgccctccctccgcggggatagccgcagccccaggccatcatctgctgctggggtccccccaccacgcggtgccaggcccagtgtcccccaggccgtctgtccactccatgccacctttctcagcatcaggacggggttgccctgtgttcaccacgagtgtggctgctggatcagggcagccggggaggtggccaggccagtggccaggccctgtggagacaatccctcaggactagggacagggctgtgccggcctgggccagggcccacggacccgcagctcagggcgcctgcccacgtcgtctgccggcggtgcgccgcgggcgtccctcgcgtctcttcactgcacattgcaatgcatttgcgattcccatttctctgctaggagccagcctgggtggcgctgctcccagagccgtgggtcccagaccttgcgttccttttgttcctgtccgtttatcaggacacgggccccacctgtcacgtgcccgaggccacccaagcccagcctgcggggcgttcccactgcctggatgccggcttgagttctgcgcacgcaggattcagtgtggggacggcccctgccggataggcctagccctggcccaggtggtgagcggtttgcagtgtccgttctcatccacctgatgggcccagataaaggcccccgctgtccagcctccctggacggccctcgcggtccctgcagcccaagatgggactcagaccctgtgccccagagctcccctgccgcagaatggggccccagccggccccgaccgggtccaggagcactgctcgcctgtacatactgttgccctagcccacctggtgccgtgggagccacccccaggtgctgggggcacagcccctccccactccggccacgcccccacccaccccgcgtgtttctgccctgtgactcctggaacctgcgtcctccccaaagccatgggaggggtgtcctcctcagaccatgcccccagatgatttttttaaataaagaaacaaatgcacctgcaaaaaaaaaaaatagaaaataaaaaaaaaaaaaaaaaaaaaaaaaaaaaa

SEQ ID NO: 65 - DNA, 5003 bp, Homo sapiens
ggatccattttataagctcaaagataattacttttcagactaagaatatttagggtaaaaagtactgttcaacatctctactgaggatgttatgatgtagcacactctataagctggagctaaaggaaactttccttaaagtgctatttactaaaaattggaacacattccttaagacaaatcgaagtgtggcacacaacatccaaacttccatcatagatacagaggtgttaccatctcccactcccaaatttctttgtcacgctgaggatactcaagaggagcaggacatgttggtcgcagcaggagaaacttgaaagcattcacttttatggaactcataagggagagaatctcttatttagtatcgtccttgatacatttattattttaaaagataatgtagccaaatgtcttcctctgtgttaaatctttacaaaactgaaatcttaaaatggtgacaaaaattctacttctgatagaatctattcatttttccaattagatagggcataattcttaatttgcaaaacaaaacgtaatatgcttatgaggttccatcccaaagaacctgctattgagagtagcattcagaataacgggtggaaatgccaactccagagtttcagatcctaccggtaattggggtagggaggggctttgggcggggcctccctagaggaggaggcgttgttagaaagctgtctggccagtccacagctgtcactaatcggggtaagccttgttgtatttgcgcgtgtgggtggcattctcaatgagaactagcttcacttgtcatttgagtgaaatctacaacccgaggcggctagtgctcccgcactactgggatctgagatcttcggagatgactgtcgcccgcagtacggagccagcagaagtccgacccttcctgggaatgggctgtaccgagaggtccgactagccccagggttttagtgagggggcagtggaactcagcgagggactgagagcttcacagcatgcacgagtttgatgccagagaaaaagtcgggagataaaggagccgcgtgtcactaaattgccgtcgcagccgcagccactcaagtgccggacttgtgagtactctgcgtctccagtcctcggacagaagttggagaactctcttggagaactccccgagttaggagacgagatctcctaacaattactactttttcttgcgctccccacttgccgctcgctgggacaaacgacagccacagttcccctgacgacaggatggaggccaagggcaggagctgaccagcgccgccctcccccgcccccgacccaggaggtggagatcctccggtccagccacattcaacacccactttctcctccctctgcccctatattcccgaaaccccctcctccttcccttttccctcctccctggagacgggggaggagaaaaggggagtccagtcgtcatgactgagctgaaggcaaagggtccccgggctccccacgtggcgggcggcccgccctcccccgaggtcggatccccactgctgtgtcgcccagccgcaggtccgttcccggggagccagacctcggacaccttgcctgaagtttcggccatacctatctccctggacgggctactcttccctcggccctgccagggacaggacccctccgacgaaaagacgcaggaccagcagtcgctgtcggacgtggagggcgcatattccagagctgaagctacaaggggtgctggaggcagcagttctagtcccccagaaaaggacagcggactgctggacagtgtcttggacactctgttggcgccctcaggtcccgggcagagccaacccagccctcccgcctgcgaggtcaccagctcttggtgcctgtttggccccgaacttcccgaagatccaccggctgcccccgccacccagcgggtgttgtccccgctcatgagccggtccgggtgcaaggttggagacagctccgggacggcagctgcccataaagtgctgccccggggcctgtcaccagcccggcagctgctgctcccggcctctgagagccctcactggtccggggccccagtgaagccgtctccgcaggccgctgcggtggaggttgaggaggaggatagctctgagtccgaggagtctgcgggtccgcttctgaagggcaaacctcgggctctgggtggcgcggcggctggaggaggagccgcggcttgtccgccgggggcggcagcaggaggcgtcgccctggtccccaaggaagattcccgcttctcagcgcccagggtcgccctggtggagcaggacgcgccgatggcgcccgggcgctccccgctggccaccacggtgatggatttcatccacgtgcctatcctgcctctcaatcacgccttattggcagcccgcactcggcagctgctggaagacgaaagttacgacggcggggccggggctgccagcgcctttgccccgccgcggacttcaccctgtgcctcgtccaccccggtcgctgtaggcgacttccccgactgcgcgtacccgcccgacgccgagcccaaggacgacgcgtaccctctctatagcgacttccagccgcccgctctaaagataaaggaggaggaggaaggcgcggaggcctccgcgcgctccccgcgttcctaccttgtggccggtgccaaccccgcagccttcccggatttcccgttggggccaccgcccccgctgccgccgcgagcgaccccatccagacccggggaagcggcggtgacggccgcacccgccagtgcctcagtctcgtctgcgtcctcctcggggtcgaccctggagtgcatcctgtacaaagcggagggcgcgccgccccagcagggcccgttcgcgccgccgccctgcaaggcgccgggcgcgagcggctgcctgctcccgcgggacggcctgccctccacctccgcctctgccgccgccgccggggcggcccccgcgctctaccctgcactcggcctcaacgggctcccgcagctcggctaccaggccgccgtgctcaaggagggcctgccgcaggtctacccgccctatctcaactacctgaggccggattcagaagccagccagagcccacaatacagcttcgagtcattacctcagaagatttgtttaatctgtggggatgaagcatcaggctgtcattatggtgtccttacctgtgggagctgtaaggtcttctttaagagggcaatggaagggcagcacaactacttatgtgctggaagaaatgactgcatcgttgataaaatccgcagaaaaaactgcccagcatgtcgccttagaaagtgctgtcaggctggcatggtccttggaggtcgaaaatttaaaaagttcaataaagtcagagttgtgagagcactggatgctgttgctctcccacagccattgggcgttccaaatgaaagccaagccctaagccagagattcactttttcaccaggtcaagacatacagttgattccaccactgatcaacctgttaatgagcattgaaccagatgtgatctatgcaggacatgacaacacaaaacctgacacctccagttctttgctgacaagtcttaatcaactaggcgagaggcaacttctttcagtagtcaagtggtctaaatcattgccaggttttcgaaacttacatattgatgaccagataactctcattcagtattcttggatgagcttaatggtgtttggtctaggatggagatcctacaaacatgtcagtgggcagatgctgtattttgcacctgatctaatactaaatgaacagcggatgaaagaatcatcattctattcattatgccttaccatgtggcagatcccacaggagtttgtcaagcttcaagttagccaagaagagttcctctgtatgaaagtattgttacttcttaatacaattcctttggaagggctacgaagtcaaacccagtttgaggagatgaggtcaagctacattagagagctcatcaaggcaattggtttgaggcaaaaaggagttgtgtcgagctcacagcgtttctatcaacttacaaaacttcttgataacttgcatgatcttgtcaaacagcttcatctgtactgcttgaatacatttatccagtcccgggcactgagtgttgaatttccagaaatgatgtctgaagttattgctgcacaattacccaagatattggcagggatggtgaaaccccttctctttcataaaaagtgaatgtcatctttttcttttaaagaattaaattttgtggcatgtctttttgttttggtcaggattatgaggtcttgagtttttataatgttcttctgaaagccttacatttataacatcatagtgtgtaaatttaaaagaaaaattgtgaggttctaattattttcttttataaagtataattagaatgtttaactgttttgtttacccatattttcttgaagaatttacaagattgaaaaagtactaaaattgttaaagtaaactatatcttatccatattatttcataccatgtaggtgaggatttttaacttttgcatctaacaaatcatcgacttaagagaaaaaatcttacatgtaataacacaaagctattatatgttatttctaggtaactccctttgtgtcaattatatttccaaaaatgaacctttaaaatggtatgcaaaattttgtctatatatatttgtgtgaggaggaaattcataactttcctcagattttcaaaagtatttttaatgcaaaaaatgtagaaagagtttaaaaccactaaaatagattgatgttcttcaaactaggcaaaacaactcatatgttaagaccattttccagattggaaacacaaatctcttaggaagttaataagtagattcatatcattatacaaatagtattgtgggttttgtaggtttttaaaataaccttttttggggagagaattgtcctctaatgaggtattgcgagtggc

SEQ ID NO: 66 - DNA, 1340 bp, Homo sapiens
gcactgtctctatgctccccagcgtctagtctatttattgtcgcggggaagctgcggccgcctcgcacccggaacaacaaagcaaggaagacggagtccgagcctcgggggctcctagcaacgggccggggcgggagttccatggagactggggagcgcgcccgtctcatcctcatccttgtcctccagcttctccttcgcatccgacgcaaccggcagcagcgctgccgccgcgtcctcagccaccgctccctcttcccacggatgtgatcttcgtggtggaaagctaaattttaaaaccaccccaatggatgcagacagtgatgttgcattggacattctaattacaaatgtagtctgtgtttttagaacaagatgtcatttaaacttaaggaagattgctttggaaggagcaaatgtaatttataaacgtgatgttggaaaagtattaatgaagcttagaaaacctagaattacagctacaatttggtcctcaggaaaaattatttgcactggagcaacaagtgaagaagaagctaaatttggtgccagacgcttagcccgtagtctgcagaaactaggttttcaggtaatatttacagattttaaggttgtaaacgttctggcagtgtgtaacatgccatttgaaatccgtttgccagaattcacaaagaacaatagacctcatgccagttacgaacctgaacttcatcctgctgtgtgctatcggataaaatctctaagagctacattacagattttttcaacaggaagtatcacagtaacagggcccaatgtaaaggctgttgctactgctgtggaacagatttacccatttgtgtttgaaagcaggaaagaaattttataattcaccacttaattggttagaatctctaactgagcaccttttaaacctgctgcacattggactcaaaaggaaaactggaccaacaataattgaggaaatagactcttttattcattcacggctacagtgtaagctccagtccctttggattttattccaaaccttgctgtaatataaaaggaagtttacaagacatgatattgctgcttttacaaaaggacattctatttattttcgcagtaattctcatgtccccataagcagagctgtcacagtgtgcactaccttagattgttttattgtcgtcattgttatttttttccattttgagctaatgtgttttatttgtgaatagtcttttacatttttgtatgctgaatatgggcaccaaagaacctgtaaaagttatctttttcaattgaatgtgcacaaataaaagtttggaaaagataaaaaaaaaaaaaaaaaaaaa

SEQ ID NO: 67 - DNA, 5426 bp, Homo sapiens
agaaggtagcagacagacagacggatctaacctctcttggatcctccagccatgaggctgctctgggggctgatctgggcatccagcttcttcaccttatctctgcagaagcccaggttgctcttgttctctccttctgtggttcatctgggggtccccctatcggtgggggtgcagctccaggatgtgccccgaggacaggtagtgaaaggatcagtgttcctgagaaacccatctcgtaataatgtcccctgctccccaaaggtggacttcacccttagctcagaaagagacttcgcactcctcagtctccaggtgcccttgaaagatgcgaagagctgtggcctccatcaactcctcagaggccctgaggtccagctggtggcccattcgccatggctaaaggactctctgtccagaacgacaaacatccagggtatcaacctgctcttctcctctcgccgggggcacctctttttgcagacggaccagcccatttacaaccctggccagcgggttcggtaccgggtctttgctctggatcagaagatgcgcccgagcactgacaccatcacagtcatggtggagaactctcacggcctccgcgtgcggaagaaggaggtgtacatgccctcgtccatcttccaggatgactttgtgatcccagacatctcagagccagggacctggaagatctcagcccgattctcagatggcctggaatccaacagcagcacccagtttgaggtgaagaaatatgtccttcccaactttgaggtgaagatcacccctggaaagccctacatcctgacggtgccaggccatcttgatgaaatgcagttagacatccaggccaggtacatctatgggaagccagtgcagggggtggcatatgtgcgctttgggctcctagatgaggatggtaagaagactttctttcgggggctggagagtcagaccaagctggtgaatggacagagccacatttccctctcaaaggcagagttccaggacgccctggagaagctgaatatgggcattactgacctccaggggctgcgcctctacgttgctgcagccatcattgagtatccaggtggggagatggaggaggcagagctcacatcctggtattttgtgtcatctcccttctccttggatcttagcaagaccaagcgacaccttgtgcctggggcccccttcctgctgcaggccttggtccgtgagatgtcaggctccccagcttctggcattcctgtcaaagtttctgccacggtgtcttctcctgggtctgttcctgaagtccaggacattcagcaaaacacagacgggagcggccaagtcagcattccaataattatccctcagaccatctcagagctgcagctctcagtatctgcaggctccccacatccagcgatagccaggctcactgtggcagccccaccttcaggaggccccgggtttctgtctattgagcggccggattctcgacctcctcgtgttggggacactctgaacctgaacttgcgagccgtgggcagtggggccaccttttctcattactactacatgatcctatcccgagggcagatcgtgttcatgaatcgagagcccaagaggaccctgacctcggtctcggtgtttgtggaccatcacctggcaccctccttctactttgtggccttctactaccatggagaccacccagtggccaactccctgcgagtggatgtccaggctggggcctgcgagggcaagctggagctcagcgtggacggtgccaagcagtaccggaacggggagtccgtgaagctccacttagaaaccgactccctagccctggtggcgctgggagccttggacacagctctgtatgctgcaggcagcaagtcccacaagcccctcaacatgggcaaggtctttgaagctatgaacagctatgacctcggctgtggtcctgggggtggggacagtgcccttcaggtgttccaggcagcgggcctggccttttctgatggagaccagtggaccttatccagaaagagactaagctgtcccaaggagaagacaacccggaaaaagagaaacgtgaacttccaaaaggcgattaatgagaaattgggtcagtatgcttccccgacagccaagcgctgctgccaggatggggtgacacgtctgcccatgatgcgttcctgcgagcagcgggcagcccgcgtgcagcagccggactgccgggagcccttcctgtcctgctgccaatttgctgagagtctgcgcaagaagagcagggacaagggccaggcgggcctccaacgagccctggagatcctgcaggaggaggacctgattgatgaggatgacattcccgtgcgcagcttcttcccagagaactggctctggagagtggaaacagtggaccgctttcaaatattgacactgtggctccccgactctctgaccacgtgggagatccatggcctgagcctgtccaaaaccaaaggcctatgtgtggccaccccagtccagctccgggtgttccgcgagttccacctgcacctccgcctgcccatgtctgtccgccgctttgagcagctggagctgcggcctgtcctctataactacctggataaaaacctgactgtgagcgtccacgtgtccccagtggaggggctgtgcctggctgggggcggagggctggcccagcaggtgctggtgcctgcgggctctgcccggcctgttgccttctctgtggtgcccacggcagccgccgctgtgtctctgaaggtggtggctcgagggtccttcgaattccctgtgggagatgcggtgtccaaggttctgcagattgagaaggaaggggccatccatagagaggagctggtctatgaactcaaccccttggaccaccgaggccggaccttggaaatacctggcaactctgatcccaatatgatccctgatggggactttaacagctacgtcagggttacagcctcagatccattggacactttaggctctgagggggccttgtcaccaggaggcgtggcctccctcttgaggcttcctcgaggctgtggggagcaaaccatgatctacttggctccgacactggctgcttcccgctacctggacaagacagagcagtggagcacactgcctcccgagaccaaggaccacgccgtggatctgatccagaaaggctacatgcggatccagcagtttcggaaggcggatggttcctatgcggcttggttgtcacggggcagcagcacctggctcacagcctttgtgttgaaggtcctgagtttggcccaggagcaggtaggaggatcgcctgagaaactgcaggagacatctaactggcttctgtcccagcagcaggctgacggctcgttccaggacctctctccagtgatacataggagcatgcaggggggtttggtgggcaatgatgagactgtggcactcacagcctttgtgaccatcgcccttcatcatgggctggccgtcttccaggatgagggtgcagagccattgaagcagagagtggaagcctccatctcaaaggcaagctcatttttgggggagaaagcaagtgctgggctcctgggtgcccacgcagctgccatcacggcctatgccctgacactgaccaaggcccctgcggacctgcggggtgttgcccacaacaacctcatggcaatggcccaggagactggagataacctgtactggggctcagtcactggttctcagagcaatgccgtgtcgcccaccccggctcctcgcaacccatccgaccccatgccccaggccccagccctgtggattgaaaccacagcctacgccctgctgcacctcctgcttcacgagggcaaagcagagatggcagaccaggctgcggcctggctcacccgtcagggcagcttccaagggggattccgcagtacccaagacacggtgattgccctggatgccctgtctgcctactggattgcctcccacaccactgaggagaggggtctcaatgtgactctcagctccacaggccggaatgggttcaagtcccacgcgctgcagctgaacaaccgccagattcgcggcctggaggaggagctgcagttttccttgggcagcaagatcaatgtgaaggtgggaggaaacagcaaaggaaccctgaaggtccttcgtacctacaatgtcctggacatgaagaacacgacctgccaggacctacagatagaagtgacagtcaaaggccacgtcgagtacacgatggaagcaaacgaggactatgaggactatgagtacgatgagcttccagccaaggatgacccagatgcccctctgcagcccgtgacacccctgcagctgtttgagggtcggaggaaccgccgcaggagggaggcgcccaaggtggtggaggagcaggagtccagggtgcactacaccgtgtgcatctggcggaacggcaaggtggggctgtctggcatggccatcgcggacgtcaccctcctgagtggattccacgccctgcgtgctgacctggagaagctgacctccctctctgaccgttacgtgagtcactttgagaccgaggggccccacgtcctgctgtattttgactcggtccccacctcccgggagtgcgtgggctttgaggctgtgcaggaagtgccggtggggctggtgcagccggccagcgcaaccctgtacgactactacaaccccgagcgcagatgttctgtgttttacggggcaccaagtaagagcagactcttggccaccttgtgttctgctgaagtctgccagtgtgctgaggggaagtgccctcgccagcgtcgcgccctggagcggggtctgcaggacgaggatggctacaggatgaagtttgcctgctactacccccgtgtggagtacggcttccaggttaaggttctccgagaagacagcagagctgctttccgcctctttgagaccaagatcacccaagtcctgcacttcaccaaggatgtcaaggccgctgctaatcagatgcgcaacttcctggttcgagcctcctgccgccttcgcttggaacctgggaaagaatatttgatcatgggtctggatggggccacctatgacctcgagggacacccccagtacctgctggactcgaatagctggatcgaggagatgccctctgaacgcctgtgccggagcacccgccagcgggcagcctgtgcccagctcaacgacttcctccaggagtatggcactcaggggtgccaggtgtgagggctgccctcccacctccgctgggaggaacctgaacctgggaaccatgaagctggaagcactgctgtgtccgctttcatgaacacagcctgggaccagggcatattaaaggcttttggcagcaaagtgtcagtgttggc

SEQ ID NO: 68 - DNA, 1578 bp, Homo sapiens
gatcagggccgagttgtctcggcggcgctgccgaggcctccacccaggacagtccccctccccgggcctctctcctcttgcctacgagtcccctctcctcgtaggcctctcggatctgatatcgtggggtgaggtgagcaggcccggggagggtggttaccgctgaggagctgcagtctctgtcaagatgatagaggtactgacaacaactgactctcagaaactgctacaccagctgaatgccctgttggaacaggagtctagatgtcagccaaaggtctgtggtttgagactaattgagtctgcacacgataatggcctcagaatgactgcaagactaagggactttgaagtaaaagatcttcttagtctaactcagttctttggctttgacacagagacattttctctagctgtgaatttactggacagattcctgtctaaaatgaaggtacagcccaagcaccttgggtgtgttggactgagctgcttttatttggctgtaaaatcaatagaagaggaaaggaatgtcccattggcaactgacttgatccgaataagtcaatataggtttacggtttcagacttgatgagaatggaaaagattgtattggagaaggtgtgttggaaagtcaaagctactactgcctttcaatttctgcaactgtattattcactccttcaagagaacttgccacttgaaaggagaaatagcattaattttgaaagactagaagctcaactgaaggcatgtcattgcaggatcatattttctaaagcaaagccttctgtgttggcattgtctatcattgcattagagatccaagcacagaagtgtgtagagttaacagaaggaatagaatgtcttcagaaacattccaagataaatggcagagatctgaccttctggcaagagcttgtatccaaatgtttaactgaatattcatcaaataagtgttccaaaccaaatgttcagaagttgaaatggattgtttctgggcgtactgcacggcaattgaagcatagctactacagaataactcaccttccaacaattcctgaaatggtcccttaactggattattacagcaccaaaaaacttctctgaagcctttctccacaaccttgttctatggattccataatgttacaatggatttaagctatgaagcctcaaaacatcacgagataagcatgatggtctcagacttgggaaaactgcctaatattatgctgtagtggaattatgtttatgatttgaattcatctgtgaaggcattcaaatcaaagctaaaagcctaaatgtgaaatgctaatgacaagcctgagaaggtaaactatgaatcttcatttctatcattgatctaactttagatattggatcaatatatttaggtggtattgaaaatgctattggaggagtcacactaatactatcaactatcagtcttcccacagcttcaatcactgtcattattctaatcctactcctacttaaattttaagttatgaggtttatgtcgaaagcaacatttcacaaatgtacttttaaggcataataagggttaacattctagg

SEQ ID NO: 69 - DNA, 1501 bp, Homo sapiens
atagaggacacgaccaagatggcggcggtgtctggcttggtgcggagaccccttcgggaggtctccgggctgctgaagaggcgctttcactggaccgcgccggctgcgctgcaggtgacagttcgtgatgctataaatcagggtatggatgaggagctggaaagagatgagaaggtatttctgcttggagaagaagttgcccagtatgatggggcatacaaggttagtcgagggctgtggaagaaatatggagacaagaggattattgacactcccatatcagagatgggctttgctggaattgctgtaggtgcagctatggctgggttgcggcccatttgtgaatttatgaccttcaatttctccatgcaagccattgaccaggttataaactcagctgccaagacctactacatgtctggtggccttcagcctgtgcctatagtcttcaggggacccaatggtgcctcagcaggtgtagctgcccagcactcacagtgctttgctgcctggtatgggcactgcccaggcttaaaggtggtcagtccctggaattcagaggatgctaaaggacttattaaatcagccattcgggataacaatccagtggtggtgctagagaatgaattgatgtatggggttccttttgaatttctcccggaagctcagtcaaaagattttctgattcctattggaaaagccaaaatagaaaggcaaggaacacatataactgtggtttcccattcaagacctgtgggccactgcttagaagctgcagcagtgctatctaaagaaggagttgaatgtgaggtgataaatatgcgtaccattagaccaatggacatggaaaccatagaagccagtgtcatgaagacaaatcatcttgtaactgtggaaggaggctggccacagtttggagtaggagctgaaatctgtgccaggatcatggaaggtcctgcgttcaatttcctggatgctcctgctgttcgtgtcactggtgctgatgtccctatgccttatgcaaagattctagaggacaactctatacctcaggtcaaagacatcatatttgcaataaagaaaacattaaatatttagtttggacttgaatatcaagtcgttgaaatttatttgaaatacttgctggcactgcacctggatttgtactgcaagacctgactattcataaaggaaaacgatttctaaagcaacagcaggtatttttgtacagggaagtttaaatgtgtttgtgtatggaaaactctccactctcctcccctagatgccatgcttccttttgtctgttacggttgccatgttctttgaataacaaattatatcacattttatcctctctcaccacaaggacaaagtatggatgtggcagagtcctgatgaaagatgtatccaaacaagataacttatatgtataaaattaaagcatataatacacatttactgttagtttgttttgataaggaataaaggaatttctaacatg

SEQ ID NO: 70 - DNA, 3514 bp, Homo sapiens
gtcatctggccagcccccgcccctcctcccggcgtcagcccgccagaggccgcgcggggcccgggcttcggccgatcagcccgggaggccccgccgcgcccccttggcccgcgcgcccgtggtcacagtggaagaggcgcccgcgctgcgctgcccggaggagccgtcgcgcgcccgcttcctgttcggctggttcctgccagctcgaggacaaaacacgcgtgcgcgcggcgggcgagcgcgctcgccgcctcagtcgccagcgccgggcgcagtccgcctttttccggagcagactggccgcggtgctagtcggtagcagcggccgccgcagcggctccgcactggcgaaccgagggcagaaaaaggcggggttgacggctttttggtaggagtgggctggaccggacgccagagacaaaggctcccaaggcaagagggactgtggccctgcgtcggctctgctcggaactgctgaccccaggaatttacgccccttcgtttttctcttctgattcttctcttctcccaagcccgcgtcccctcacgcgtggcctctctccttgccgggagggccgcgatggaggtcccgcccaggctttcccatgtgccgccgccattgttcccctccgctcccgctactttagcctcccgcagcctctcccattggcggccgcggccgccgcggcagctagccccgctcctcccttcgctcgctcccagctccgcccggcagggggcgcgccgggcccagcgccacgtcaccgcccagcagccctcccgattggcgggcggggcggctataaagggagggcgcaggcggcgcccggatctcttccgccgccattttaaatccagctccatacaacgctccgccgccgctgctgccgcgacccggactgcgcgccagcacccccctgccgacagctccgtcactatggaggatatgaacgagtacagcaatatagaggaattcgcagagggatccaagatcaacgcgagcaagaatcagcaggatgacggtaaaatgtttattggaggcttgagctgggatacaagcaaaaaagatctgacagagtacttgtctcgatttggggaagttgtagactgcacaattaaaacagatccagtcactgggagatcaagaggatttggatttgtgcttttcaaagatgctgctagtgttgataaggttttggaactgaaagaacacaaactggatggcaaattgatagatcccaaaagggccaaagctttaaaagggaaagaacctcccaaaaaggtttttgtgggtggattgagcccggatacttctgaagaacaaattaaagaatattttggagcctttggagagattgaaaatattgaacttcccatggatacaaaaacaaatgaaagaagaggattttgttttatcacatatactgatgaagagccagtaaaaaaattgttagaaagcagataccatcaaattggttctgggaagtgtgaaatcaaagttgcacaacccaaagaggtatataggcagcaacagcaacaacaaaaaggtggaagaggtgctgcagctggtggacgaggtggtacgaggggtcgtggccgaggtcagggccaaaactggaaccaaggatttaataactattatgatcaaggatatggaaattacaatagtgcctatggtggtgatcaaaactatagtggctatggcggatatgattatactgggtataactatgggaactatggatatggacagggatatgcagactacagtggccaacagagcacttatggcaaggcatctcgagggggtggcaatcaccaaaacaattaccagccatactaaaggagaacattggagaaaacagcgggaacttcattgcaggccgtgtgtcaccctgaccacgtctatctctgggggtcgcacgttgcgggcagagcgcaaggcatacaccagaaaacgctgtcctgtggaggagatgttaaagtaacccatcttgcaggacgacattgaagattggtcttctgttgatctaagatgattattttgtaaaagactttctagtgtacaagacaccattgtgtccaactgtatatagctgccaattagttttctttgtttttactttgtcctttgctatctgtgttatgactcaatgtggatttgtttatacacattttatttgtatcatttcatgttaaacctcaaataaatgcttccttatgtgattgcttttctgcgtcaggtactacatagctctgtaaaaaatgtaatttaaaataagcaataattaaggcacagttgattttgtagagtattggtccatacagagaaactgtggtcctttataaatagccagccagcgtcaccctcttctccaatttgtaggtgtattttatgctcttaaggcttcatcttctccctgtaactgagatttctaccacacctttgaacaatgttctttcccttctggttatctgaagactgtcctgaaaggaagacataagtgttgtgattagtagaagctttgtaatcataacacaatgagtaattcttgtataaaagttcagatacaaaaggagcactgtaaaactggtaggagctatggtttaagagcattggaagtagttacaactcaaggattttggtagaaaggtatgagtttggtcgaaaaattaaaatagtggcaaaataagatttagttgtgttttctcagagccgccacaagattgaacaaaatgttttctgtttgggcatcctgaggaagttgtattagctgttaatgctctgtgagtttagagaaaagtcttgatagtaaatctagtttttgacacagtgcatgaactaagtagttaaatatttacatattcagaaaggaatagtggaaaaggtatcttggttatgacaaagtcattacaaatgtgactaagtcattacaaatgtgactgagtcattacagtggaccctctgggtgcattgaaaagaatccgttttatatccaggtttcagaggacctggaataataataagctttggattttgcattcagtgtagttggattttgggaccttggcctcagtgttatttactgggattggcatacgtgttcacaggcagagtagttgatctcacacaacgggtgatctcacaaaactggtaagtttcttatgctcatgagccctccctttttttttttaatttggtgcctgcaactttcttaacaatgattctacttcctgggctatcacattataatgctcttggcctcttttttgctgctgttttgctattcttaaacttaggccaagtaccaatgttggctgttagaagggattctgttcattcaacatgcaactttagggaatggaagtaagttcatttttaagttgtgtggtcagtaggtgcggtgtctagggtagtgaatcctgtaagttcaaatttatgattaggtgacgagttgacattgagattgtccttttcccctgatcaaaaaaatgaataaagcctttttaaacg

SEQ ID NO: 71 - DNA, 1599 bp, Homo sapiens
aagatcctggcctgtgcagctcgggtttccgagcttctgcctcaggcatctccgcgatctcctctcccctccaatcctatccgtgatggacgatgcccacgagtcgccctccgacaaaggtggagagacaggggagtcggatgagacggccgctgtgcccggggacccgggggctaccgacaccgatggaatcccagaggaaactgacggagacgcagatgtggacttgaaagaagctgcagcggaggaaggcgagctcgagagtcaggatgtctcagatttaacaacagttgaaagggaagactcatcattacttaatcctgcagccaaaaaactgaaaatagataccaaagaaaagaaagagaaaaagcagaaagtagatgaagatgagattcagaagatgcaaatcctggtttcttctttttctgaggagcagctgaaccgttatgaaatgtatcgccgctcagctttccctaaggcagccatcaaaaggctgatccagtccatcactggcacctctgtgtctcagaatgttgttattgctatgtctggtatttccaaggttttcgtcggggaggtggtagaagaagcactggatgtgtgtgagaagtggggagaaatgccaccactacaacccaaacatatgagggaagccgttagaaggttaaagtcaaaaggacagatccctaactcgaagcacaaaaaaatcatcttcttctagaccaaagtctagaaaggcctatgttactgacggaagaagtattggttccagacttcctataagactgtctgcattggtgctttagtatctcaggcctccaaggattccatgatgattttaatgtctttctcaaaactctgatatttgtcacacctagaaagtatgtagcctgattgatacttgccttgactaaattttgggacctcttggggcattttgaagtatttaactgtcttgaccagttggaagaagatacgtgggccataagcatcttctggacaggggaactgctttcagagagaaaacctttccaagagagttttgttttgttttggtttcgttttgtttgagatagggtcttgctctatcacctaggctggagtgcagcggcatgactgcagccttgaactcctgggcttaagtgaccctcccacctcagtctcctgagtagctaggactacaggcacacactactgtgcccagctaacttatttttattttttatggagatggggtcttgctttgttgcccaggctggtcgtgaactcctggcttcaagcagtcctcctgcctcagcctcctaaagtgccgagggctttaatggtttcacattgaagcctgaagttgctaagacttaggttgtttcttatatctggttttaagtagatgaaacaaccagaaacttttacttgtgatactctaccatgaaggatgcggtaatggcaggaatagcagaataattggtgcttgtaaacatttaagattctcctgtggattttggtgagtgatcattaaactgttttccaacttgcaaaaaaaaaaaaaaaaaaaaaaaaaaaaaaaaaaaaaaaaaaaaaaaaaaaaaaaaaaaaaaaaaa

SEQ ID NO: 72 - DNA, 2068 bp, Homo sapiens
  misc_feature (143)..(143): n = a, t, g, or c
ggcgccgggattgggagggcttcttgcaggctgctgggctggggctaagggctgctcagtttccttcagcggggcactgggaagcgccatggcactgcagggcatctcggtcgtggagctgtccggcctggccccgggccgtntctgtgctatggtcctggctgacttcggggcgcgtgtggtacgcgtggaccggcccggctcccgctacgacgtgagccgcttgggccggggcaagcgctcgctagtgctggacctgaagcagccgcgggagccgcgtgctgcggcgtctgtgcaagcggtcggatgtgctgctggagcccttccgccgcggtgtcatggagaaactccagctgggcccagagattctgcagcgggaaaatccaaggcttatttatgccaggctgagtggatttggccagttcaggaaagcttctgccggttagctggccacgatatcaactatttggctttgtcaggtgttctctcaaaaattggcagaagtggtgagaatccgtatgccccgctgaatctcgtggctgactttgctggtggtggccttatgtgtgcactgggcattataatggctctttttgaccgcacacgcactgacaagggtcaggtcattgatgcaaatatggtggaaggaacagcatatttaagttcttttctgtggaaaactcagaaatcgagtctgtgggaagcacctcgaggacagaacatgttggatggtggagcacctttctatacgacttacaggacagcagatggggaattcatggctgttggagcaatagaaccccagttctacgagctgctgatcaaaggacttggactaaagtctgatgaacttcccaatcagatgagcacggatgattggccagaaatgaagaagaagtttgcagatgtatttgcaaagaagacgaaggcagagtggtgtcaaatctttgacggcacagatgcctgtgtgactccggttctgacttttgaggaggttgttcatcatgatcacaacaaggaacggggctcgtttatcaccagtgaggagcaggacgtgagcccccgccttgcacctctgctgttaaacaccccagccatcccttcttccaaaggggatcctttcataggagaacacactgaggagatacttgaagaatttggattcagccgagaagagatttatcagcttaactcagataaaatcattgaaagtaataaggtaaaagctagtctctaacttccaggcccacggctcaagtgaatttgaatactgcatttacagtgtagagtaacacataacattgtatgcatggaaacatggaggaacagtattacagtgtcctaccactctaatcaagaaaagaattacagactctgattctacagtgatgattgaattctaaaaatggttatcattagggcttttgatttataaaactttgggtacttatactaaattatggtagttattctgccttccagtttgcttgatatatttgttgatattaagattcttgacttatattttgaatgggttctagtgaaaaaggaatgatatattcttgaagacatcgatatacatttatttacactcttgattctacaatgtagaaaatgaggaaatgccacaaattgtatggtgataaaagtcacgtgaaacagagtgattggttgcatccaggccttttgtcttggtgttcatgatctccctctaagcacattccaaactttagcaacagttatcacactttgtaatttgcaaagaaaagtttcacctgtattgaatcagaatgccttcaactgaaaaaaacatatccaaaataatgaggaaatgtgttggctcactacgtagagtccagagggacagtcagttttagggttgcctgtatccagtaactcggggcctgtttccccgtgggtctctgggctgtcagctttcctttctccatgtgtttgatttctcctcaggctggtagcaagttctggatcttatacccaacacacagcaacatccagaaataaagatctcaggaccccccaaaaaaaaaaaaaaaaaaaaaaaaaaaaa

SEQ ID NO: 73 - DNA, 1252 bp, Homo sapiens
cggccggttttggtaggcccgggccgccgccaggcctccgcctgagcccgcacccgccatggacaactacgcagatctttcggataccgagctgaccaccttgctgcgccggtacaacatcccgcacgggcctgtagtaggatcaactcgtaggctttacgagaagaagatcttcgagtacgagacccagaggcggcggctctcgccccccagctcgtccgccgcctcctcttatagcttctctgacttgaattcgactagaggggatgcagatatgtatgatcttcccaagaaagaggacgctttactctaccagagcaagggctacaatgacgactactatgaagagagctacttcaccaccaggacttatggggagcccgagtctgccggcccgtccagggctgtccgccagtcagtgacttcattcccagatgctgacgctttccatcaccaggtgcatgatgacgatcttttgtcttcttctgaagaggagtgcaaggatagggaacgccccatgtacggccgggacagtgcctaccagagcatcacgcactaccgccctgtttcagcctccaggagctccctggacctgtcctattatcctacttcctcctccacctcttttatgtcctcctcatcatcttcctcttcatggctcacccgccgtgccatccggcctgaaaaccgtgctcctggggctgggctgggccaggatcgccaggtcccgctctggggccagctgctgcttttcctggtctttgtgatcgtcctcttcttcatttaccacttcatgcaggctgaagaaggcaaccccttctagagggagccatgagggtctgggcttcagagctaggtctttggggaagtcctggctgactgccttagcagtgggggtgggggtgggggcaggggcaggggctttatgtgtttttgcttggggggcgctgggcctagcccagagtagtgcttgctccccctgccttgtcccaccagggaggcagcagactcaggccctccatggtcctctttgtcattttgttgacatgcattcctccttttgtcatcttgttggggggaggggattaaccaaaggccaccctgactttgtttttgtggacacacaataaaagccccgtttatttgttaaaaaaaaaaaaaaaaaaaaaaaaaaaaaaaaaaaaaaaaaaaaaaaaaaaaaaaaaaaaaaaaaaaaaaaaaaaaaaaaaaaaaaaaaaaaaaaaaaaaaaaa

SEQ ID NO: 74 - DNA, 1658 bp, Homo sapiens
cttccccttcccctcccagcgcgcccgcgcgccccgcggccctcggcgagcagctcggctccccccagcgctccccgggcccaaagatatggcaatggtagttagcagctggcgagatccgcaggacgacgtggccgggggcaaccccggcggccccaaccccgcagcgcaggcggcccgcggcggcggcggcggcgccggcgagcagcagcagcaggcgggctcgggcgcgccgcacacgccgcagaccccgggccagcccggagcgcccgccacccccggcacggcgggggacaagggccagggcccgcccggttcgggccagagccagcagcacatcgagtgcgtggtgtgcggggacaagtcgagcggcaagcactacggccaattcacctgcgagggctgcaaaagtttcttcaagaggagcgtccgcaggaacttaacttacacatgccgtgccaacaggaactgtcccatcgaccagcaccaccgcaaccagtgccaatactgccgcctcaagaagtgcctcaaagtgggcatgaggcgggaagcggttcagcgaggaagaatgcctccaacccagcccaatccaggccagtacgcactcaccaacggggaccccctcaacggccactgctacctgtccggctacatctcgctgctgctgcgcgccgagccctaccccacgtcgcgctacggcagccagtgcatgcagcccaacaacattatgggcatcgagaacatctgcgagctggccgcgcgcctgctcttcagcgccgtcgagtgggcccgcaacatccccttcttcccggatctgcagatcaccgaccaggtgtccctgctacgcctcacctggagcgagctgttcgtgctcaacgcggcccagtgctctatgccgctgcacgtggcgccgttgctggccgccgccggcctgcatgcctcgcccatgtctgccgaccgcgtcgtggccttcatggaccacatccgcatcttccaggagcaggtggagaagctcaaggcgctacacgtcgactcagccgagtacagctgcctcaaagccatcgtgctgttcacgtcagacgcctgtggcctgtcggatgcggcccacatcgagagcctgcaggagaagtcgcagtgcgcactggaggagtacgtgaggagccagtaccccaaccagcccagccgttttggcaaactgctgctgcgactgccctcgctgcgcaccgtgtcctcctccgtcatcgagcagctcttcttcgtccgtttggtaggtaaaacccccatcgaaactctcatccgcgatatgttactgtctgggagcagcttcaactggccttacatgtccatccagtgctcctagaccttgggcgcttcccacctgccccgtccccctagagactcagaggacccacctgggccaaggactccaaagccgcggggacaccgggaagtgcagcgggccaggcaggctgggtgggagggaggagggccgagacaggagcagcccacccagcagaaatacaatccgagctacaaagcatgggaaaaagagactcttttaggatcagatctgtgagcacgttggcgaggaaaaacaaaacaaacaaaaaaaagaaccttgtgtctgtctggtgaaaaaaaaaaaaaaaaaaaaaaaa

SEQ ID NO: 75 - DNA, 2444 bp, Homo sapiens
gcgttctcgggaagctgctgccgtagctgccgccgccgctaccaccgcgttcgggtgtagaatttggaatccctgcgccgcgttaacaatgaagcagagttcgaacgtgccggctttcctcagcaagctgtggacgcttgtggaggaaacccacactaacgagttcatcacctggagccagaatggccaaagttttctggtcttggatgagcaacgatttgcaaaagaaattcttcccaaatatttcaagcacaataatatggcaagctttgtgaggcaactgaatatgtatggtttccgtaaagtagtacatatcgactctggaattgtaaagcaagaaagagatggtcctgtagaatttcagcatccttacttcaaacaaggacaggatgacttgttggagaacattaaaaggaaggtttcatcttcaaaaccagaagaaaataaaattcgtcaggaagatttaacaaaaattataagtagtgctcagaaggttcagataaaacaggaaactattgagtccaggctttctgaattaaaaagtgagaatgagtccctttggaaggaggtgtcagaattacgagcaaagcatgcacaacagcaacaagttattcgaaagattgtccagtttattgttacattggttcaaaataaccaacttgtgagtttaaaacgtaaaaggcctctacttctaaacactaatggagcccaaaagaagaacctgtttcagcacatagtcaaagaaccaactgataatcatcatcataaagttccacacagtaggactgaaggtttaaagccaagggagaggatttcagatgacatcattatttatgatgttactgatgataatgcagatgaagaaaatatcccagttattccagaaactaatgaggatgttatatctgatccctccaactgtagccagtaccctgatattgtcatcgttgaagatgacaatgaagatgagtatgcacctgtcattcagagtggagagcagaatgaaccagccagagaatccctaagttcaggcagtgatggcagcagccctctcatgtctagtgctgtccagctaaatggctcatccagtctgacctcagaagatccagtgaccatgatggattccattttgaatgataacatcaatcttttgggaaaggttgagctgttggattatcttgacagtattgactgcagtttagaggacttccaggccatgctatcaggaagacaatttagcatagacccagatctcctggttgatcttttcactagttctgtgcagatgaatcccacagattacatcaataatacaaaatctgagaataaaggattagaaactaccaagaacaatgtagttcagccagtttcggaagagggaagaaaatctaaatccaaaccagataagcagcttatccagtataccgcctttccacttcttgcattcctcgatgggaaccctgcttcttctgttgaacaggcgagtacaacagcatcatcagaagttttgtcctctgtagataaacccatagaagttgatgagcttctggatagcagcctagacccagaaccaacccaaagtaagcttgttcgcctggagccattgactgaagctgaagctagtgaagctacactgttttatttatgtgaacttgctcctgcacctctggatagtgatatgccacttttagatagctaaatccccaggaagtggactttacatgtatatattcatcaaaatgatgaactatttattttaaagtatcatttggtactttttttgtaaattgctttgttttgtttaatcagatactgtggaataaaagcaccttttgcttttctcactaaccacacactcttgcagagctttcaggtgttactcagctgcatagttacgcagatgtaatgcacattattggcgtatctttaagttggattcaaatggccatttttctccaattttggtaaattggatatcttttttttacaaatacgaccattaacctcagttaaatttttgtttgttttcctgtttgatgctgtctatttgcattgagtgtaagtcatttgaactaatggtataactcctaaagcttctctgctccagttatttttattaaatatttttcacttggcttatttttaaaactgggaacataaagtgcctgtatcttgtaaaacttcatttgtttcttttggttcagagaagttcatttatgttcaaagacgtttattcatgttcaacaggaaagacaaagtgtacgtgaatgctcgctgtctgatagggttccagctccatatatatagaaagatcgggggtgggatgggatggagtgagccccatccagttagttggactagttttaaataaaggttttccggtttgtgtttttttgaaccatactgtttataaaataaatacaatgaatgttgagtactagtgg

SEQ ID NO: 76 - DNA, 3263 bp, Homo sapiens
gctcctgagaccggcgggcacacgggggtctgtggcccccgccgtagcagtggctgccgccgtcgcttggttcccgtcggtctgcgggaggcgggttatggcggcggcggcagtgagagctgtgaatgaattctccgggtggacgagggaagaagaaaggctccggcggcgccagcaacccggtgcctcccaggcctccgcccccttgcctggcccccgcccctcccgccgccgggccggcccctccgcccgagtcgccgcataagcggaacctgtactatttctcctacccgctgtttgtaggcttcgcgctgctgcgtttggtcgccttccacctggggctcctcttcgtgtggctctgccagcgcttctcccgcgccctcatggcagccaagaggagctccggggccgcgccagcacctgcctcggcctcggccccggcgccggtgccgggcggcgaggccgagcgcgtccgagtcttccacaaacaggccttcgagtacatctccattgccctgcgcatcgatgaggatgagaaagcaggacagaaggagcaagctgtggaatggtataagaaaggtattgaagaactggaaaaaggaatagctgttatagttacaggacaaggtgaacagtgtgaaagagctagacgccttcaagctaaaatgatgactaatttggttatggccaaggaccgcttacaacttctagagaagatgcaaccagttttgccattttccaagtcacaaacggacgtctataatgacagtactaacttggcatgccgcaatggacatctccagtcagaaagtggagctgttccaaaaagaaaagaccccttaacacacactagtaattcactgcctcgttcaaaaacagttatgaaaactggatctgcaggcctttcaggccaccatagagcacctagttacagtggtttatccatggtttctggagtgaaacagggatctggtcctgctcctaccactcataagggtactccgaaaacaaataggacaaataaaccttctacccctacaactgctactcgtaagaaaaaagacttgaagaattttaggaatgtggacagcaaccttgctaaccttataatgaatgaaattgtggacaatggaacagctgttaaatttgatgatatagctggtcaagacttggcaaaacaagcattgcaagaaattgttattcttccttctctgaggcctgagttgttcacagggcttagagctcctgccagagggctgttactctttggtccacctgggaatgggaagacaatgctggctaaagcagtagctgcagaatcgaatgcaaccttctttaatataagtgctgcaagtttaacttcaaaatacgtgggagaaggagagaaattggtgagggctctttttgctgtggctcgagaacttcaaccttctataatttttatagatgaagttgatagccttttgtgtgaaagaagagaaggggagcacgatgctagtagacgcctaaaaactgaatttctaatagaatttgatggtgtacagtctgctggagatgacagagtacttgtaatgggtgcaactaataggccacaagagcttgatgaggctgttctcaggcgtttcatcaaacgggtatatgtgtctttaccaaatgaggagacaagactacttttgcttaaaaatctgttatgtaaacaaggaagtccattgacccaaaaagaactagcacaacttgctagaatgactgatggatactcaggaagtgacctaacagctttggcaaaagatgcagcactgggtcctatccgagaactaaaaccagaacaggtgaagaatatgtctgccagtgagatgagaaatattcgattatctgacttcactgaatccttgaaaaaaataaaacgcagcgtcagccctcaaactttagaagcgtacatacgttggaacaaggactttggagataccactgtttaaggaaatacctttgtaaacctgcagaacattttacttaaaagaggaaacacaagatcttcaatgaacgtcatcggctacagaaacagcctaagtttacaggactttttagagtcttacatatttgtgcaccaaacttgaagatgaaccagaaaacagacttaaacaaaatatacaatgcaaatgtaattttttgttgtttaaggccttgccttgatggtcacagttatcccaatggacactaagttagagcacaacaaaacctgattctggtcttctttaccaatataatcataatgtaaataataatttgtatattgtgttgcagatgaaagtattccaggaacagtgaatggtagaagacacaagaacatttgtttgtttgtcttctgatgttttttcttaaaatagtaatttctcctacttttcttttctactgttgtcttaactacaggtgattggaatgccaaacactcttaagtttattttcttttttcgttttataaattcagtgtgccaaatgaaacttttttcctaagtaactgtaataggaaaaagtttattttgagagtttcttcttcataaatctacagacattaaacaattgttgtgttctttttaccttttatttttctattaccttgctaccaaacagtttagatagcaatataatagcaaaaaagcaaatatggtaaaatagagaaggtttgaaggtttgagttactctgtcatataacatgtagatcagtcttcatgtgacctgcagtatttttttttctaatgtatttgtcagaaatctgttgtagactgttaacttcttcctgatggaatttattttctgcaagaattattctgatatttaagagagccaattttaactgctgtgaaaatgtttccagtgcaagagaagggaaatactaggaactaagacatttctaatttattgcttattactttcttaattttacaggataattataagcaagtggaactaccatcttttattcttaataattattaatcccttcaatgaaactttaaaaaaactgaatttttatacatggcatacatttttctagttccttctgcttgctttattaactcaaaagttctagttctagtctgttgatctgccttttgttctcccaaaatgtacagtaattccatttgtttgtataaatatgcctggattttcattataaaaatgtcattgtagggagtagagactcatatcatggccttttaaatattgtaataaaggcaaatagatatttgcccttagtttactgg

SEQ ID NO: 77 - DNA, 6452 bp, Homo sapiens
cgagcgagtgtcatggcggccggcgtcgagttggcaggagtaacccacggaactgaggaaagtcattagagctgagaaagaagtggcccaatctggacggtgggaattcgtgggaatgagcagaaggccctccgtagtgactgtgtcactagaggcgggcccctggtaaaattccaggccaggcctctgcgtttctaggcagaacctggagtcggccttgcctgagaacccagctttgtgttatcgtatcctgtctcgcgaaggcaggcgttcaaggatatttggtcggatcgcccggcggcgctaaacgttttcttttttccgagcggaccgggtcgttctctaaactcgccgcgatgtcgtcctggcttgggggcctcggctccggattgggccagtctctgggtcaagtcgggggcagcctggcttccctcactggccagatatcaaactttacaaaggatatgctgatggagggcacggaggaagtggaagcagaattacctgattctaggacaaaggaaattgaagccattcatgcaatcttgagatcagagaatgaaaggcttaagaaactttgtactgatctagaagagaaacatgaagcatcagagattcaaataaagcagcaatctacaagttaccgaaatcaacttcaacaaaaagaggtagaaatcagccatcttaaagccagacagattgcactccaggatcagttgctgaaactgcagtcagctgctcagtcagtaccttcaggagctggtgtaccagcaaccactgcatcatcttcattcgcttatgggattagtcatcatccttcagctttccatgacgatgacatggactttggtgatataatttcatcccaacaagaaataaaccgactctcaaatgaagtttcaagacttgagtctgaagttggccattggaggcatattgctcagacttccaaagcacaaggaacagataactctgatcaaagtgaaatatgtaaactacaaaatatcattaaggaactaaaacagaaccgaagtcaggaaattgatgaccatcaacatgaaatgtcagtactgcagaatgcacaccaacagaaattgacagaaataagtcgacgacatcgagaagaattaagtgactatgaagaacgaattgaagaacttgaaaatctgttacaacaaggtggctctggagttatagaaactgatctctctaaaatctatgagatgcaaaaaactattcaagttctacaaatagaaaaagtggagtctaccaaaaaaatggaacaacttgaggataaaataaaagatataaataaaaaattatcttctgcagaaaatgacagagatattttgaggagggaacaagaacagctaaatgtggaaaagagacaaataatggaagaatgtgaaaacttgaaattggaatgtagtaaattgcagccttctgctgtgaagcaaagtgatactatgacagaaaaggaaagaattcttgcccagagtgcatcagtggaagaagtgttcagactacaacaagcactgtctgatgccgaaaatgaaataatgagattgagtagtttaaaccaggataacagtcttgctgaagacaatctgaaacttaaaatgcgtatcgaagttttagaaaaagagaagtcattactgagtcaagaaaaggaagaacttcagatgtcacttttaaaattgaacaatgaatatgaagtaattaaaagtacagctacaagagacataagtttggattcagaattacatgacttaagacttaatttggaggcaaaggaacaagaactcaatcagagtattagtgaaaaggaaacactgatagctgagatagaagaattggacagacagaatcaagaagctacaaagcacatgattttgataaaagatcagctatcaaaacaacaaaatgaaggagatagcatcatcagtaaactgaaacaagatctaaatgatgaaaaaaagagagttcatcaacttgaagatgataaaatggacattactaaagagttagatgtacagaaagaaaagctaattcaaagtgaagtggccctaaatgatttacatttaaccaagcagaaacttgaggacaaagtagaaaatttagtagatcagctaaataaatcacaagaaagtaatgtaagcatccagaaggagaatttagaacttaaggagcatattagacaaaatgaggaggagctttctagaataaggaatgagttaatgcagtctctaaatcaagactctaatagtaattttaaggataccttacttaaagaaagagaagctgaagttagaaacttaaagcaaaatctttcagaattagaacagctcaatgaaaatttaaagaaagttgcttttgatgtcaaaatggaaaatgaaaagttagttttagcatgtgaagatgtgaggcatcagttagaagaatgtcttgctggtaacaatcagctttctctggaaaaaaacactattgtggagactctaaaaatggaaaaaggagagatagaggcagaattgtgttgggctaaaaagaggctgttggaagaagcaaacaagtatgagaaaaccattgaagaactgtcaaatgcacgtaatttgaatacctctgccttacagctggaacatgagcatttaattaaactcaatcaaaagaaagacatggaaatagcagaactcaaaaagaatattgaacaaatggatactgaccataaagaaactaaggacgttttgtcatctagtttagaagagcagaagcagttgacacaacttataaacaagaaagaaatttttattgaaaagcttaaagaaagaagttcaaagctgcaggaggaattggataaatattctcaggccttaagaaaaaatgaaattttaagacagaccatagaggaaaaagaccgaagtcttggatccatgaaagaggaaaataatcatctgcaagaagaattggaacgactcagggaagagcagagtcgaaccgcacctgtggctgaccctaaaacccttgatagtgttactgaactagcatctgaggtatctcaactgaacacgatcaaggaacatcttgaagaggaaattaaacatcatcaaaagataattgaagatcaaaaccagagtaagatgcaactacttcagtctttacaagagcaaaagaaggaaatggatgagtttagataccagcatgagcaaatgaacgccacacacacccagctctttttagagaaggatgaggaaattaagagtttgcaaaaaacaattgaacaaatcaaaacccagttgcatgaagaaagacaggacattcaaacagataactctgatatttttcaagaaacaaaagttcagagccttaatatagaaaatggaagtgaaaagcatgatttatctaaagctgaaacggaaagattagtgaaaggaataaaagagcgagaactggagattaaacttctaaatgaaaagaatatatctttaactaaacagattgatcagttgtccaaagatgaagttggtaaactaactcagattattcagcagaaagatttggagatacaagctcttcatgctagaatttcttcaacttcccatactcaagatgttgtttaccttcaacagcaactgcaggcttatgctatggaaagagaaaaggtatttgctgttttgaatgagaagactagggaaaatagccatctaaaaacagaatatcacaaaatgatggatattgttgctgccaaggaagcagctcttatcaaactgcaagatgaaaataaaaaattgtccactagatttgaaagtagtggccaagatatgtttagagaaactattcagaatttatcacgtatcattcgagaaaaagacatcgaaatagatgcactaagtcagaaatgtcagactttattggcagttttacaaacatccagcactggtaatgaggctggaggtgttaatagtcatcaatttgaggagcttctacaggaacgtgacaagttaaaacagcaagtaaagaaaatggaagagtggaagcagcaggtgatgaccacagtacaaaatatgcaacacgagtcagcccagcttcaggaagagcttcaccaacttcaagcacaggttttggttgacagtgataataattctaaattacaagtggactatactggcctgatccaaagttatgagcagaatgaaaccaaactcaaaaattttgggcaggaattagcacaagttcagcacagcattgggcagctttgcaataccaaggatcttcttttaggaaaacttgatattatttcaccccagctgtcttctgcatcattgcttactccccagtctgcagagtgtcttagagcaagtaagtctgaagtattgagtgaatcttctgaattgcttcagcaagagttagaagagctaagaaaatcactacaggaaaaagatgcaacaattagaactctccaggaaaataaccacagattgtctgattcgattgctgccacctcagagctagaaagaaaagaacacgaacaaaccgattcagaaatcaagcagctaaaggagaaacaagatgttttgcaaaagttacttaaggaaaaagacctcttaatcaaagccaaaagtgatcaactactttcttccaatgaaaatttcactaacaaagtaaatgaaaacgaacttttgaggcaggcagtaacaaacctgaaggagagaatattaattctagagatggacattggcaaactaaaaggagaaaatgaaaaaatagtggaaacatacaggggaaaggaaacagaatatcaagcgttacaagagactaacatgaagttttctatgatgctgcgagaaaaagagtttgagtgccactcaatgaaggagaaggctcttgcttttgaacagctattgaaagagaaagaacagggcaagactggagagttaaatcagcttttaaatgcagttaaatcaatgcaggagaagacagttgtgtttcaacaggagagagaccaagtcatgttggccctgaaacaaaaacaaatggaaaatactgccctacagaatgaggttcaacgtttacgtgacaaagaatttcgttcaaaccaagagctagagagattgcgtaatcatcttttagaatcagaagattcttatacccgtgaagctttggctgcagaagatagagaggctaaactaagaaagaaagtcacagtattggaggaaaagctagtttcatcctctaatgcaatggaaaatgcaagccatcaagccagtgtgcaggtagagtcattgcaagaacagttgaatgtagtttccaagcaaagggatgaaactgcgctgcagctttctgtctctcaggaacaagtaaagcagtatgctctgtcactggccaacctgcagatggtactagagcatttccaacaagaggaaaaagctatgtattctgctgaactcgaaaagcaaaaacagcttatagctgaatggaagaaaaacgcagaaaatctggaaggaaaagtgatatcattacaggaatgtttggatgaagcaaatgctgcattggattcagcatcaagacttacagaacagttagatgtaaaagaagaacaaattgaagaacttaaaagacaaaatgagctccgacaagaaatgctggatgatgtacaaaagaaattgatgagcttagcaaacagctcagaaggaaaagtagacaaagtcctaatgagaaacctcttcattggtcatttccacacaccgaaaaatcagcgtcatgaagtgttacggttaatggggagcatcctgggcgtcagaagggaggagatggagcagttgtttcatgacgatcagggcagtgttaccaggtggatgactgggtggcttggaggaggatcaaaaagtgttcccaacacacctttgagaccaaatcagcaatctgtggttaatagttctttttcagaactttttgttaaatttctagaaacagaatctcatccatccattccaccaccaaagctttctgttcatgatatgaaacctctggattcaccaggaagaagaaaaagagatacaaatgcaccagaaagttttaaagatacagcagaatccaggtctggtagaagaacagatgtaaatccgtttttggctcctcgctcggcagctgtacctcttattaacccagctggacttggacctggtgggcccgggcatcttcttctgaaacccatctcagatgttttgcccacatttacacctttgccagcgttacctgacaacagtgctggggttgtgctgaaagaccttttaaagcaatagatgattctcaagccagagacaatctagcactttaaagaaaccatgaacactatatgtatgtactttatcacaaagtggcctttggggagaaagtcatgtatttgttcgcaattatgctttctctgaatttaataaaaatattcctaatgcttttag

SEQ ID NO: 78 - DNA, 2648 bp, Homo sapiens
gcctctctccatcagacaccccaaggttccatccgaagcaggcggagcaccgaacgcaccccggggtggtcagggacccccatccgtgctgccccctaggagcccgcgcctctcctctgcgccccgcctctcgggccgcaacatcgcgcggttcctttaacagcgcgctggcagggtgtgggaagcaggaccgcgtcctcccgccccctcccatccgagtttcaggtgaattggtcaccgagggaggaggccgacacaccacacctacactcccgcgtccacctctccctccctgcttcctctggcggaggcggcaggaaccgagagccaggtccagagcgccgaggagccggtctaggacgcagcagattggtttatcttggaagctaaagggcattgctcatcctgaagatcagctgaccattgacaatcagccatgtcatccaggcctcttgaaagtccacctccttacaggcctgatgaattcaaaccgaatcattatgcaccaagcaatgacatatatggtggagagatgcatgttcgaccaatgctctctcagccagcctactctttttacccagaagatgaaattcttcacttctacaaatggacctctcctccaggagtgattcggatcctgtctatgctcattattgtgatgtgcattgccatctttgcctgtgtggcctccacgcttgcctgggacagaggctatggaacttcccttttaggaggtagtgtaggctacccttatggaggaagtggctttggtagctacggaagtggctatggctatggctatggttatggctatggctacggaggctatacagacccaagagcagcaaagggcttcatgttggccatggctgccttttgtttcattgccgcgttggtgatctttgttaccagtgttataagatctgaaatgtccagaacaagaagatactacttaagtgtgataatagtgagtgctatcctgggcatcatggtgtttattgccacaattgtctatataatgggagtgaacccaactgctcagtcttctggatctctatatggttcacaaatatatgccctctgcaaccaattttatacacctgcagctactggactctacgtggatcagtatttgtatcactactgtgttgtggatccccaggaggccattgccattgtactggggttcatgattattgtggcttttgctttaataattttctttgctgtgaaaactcgaagaaagatggacaggtatgacaagtccaatattttgtgggacaaggaacacatttatgatgagcagccccccaatgtcgaggagtgggttaaaaatgtgtctgcaggcacacaggacgtgccttcacccccatctgactatgtggaaagagttgacagtcccatggcatactcttccaatggcaaagtgaatgacaagcggttttatccagagtcttcctataaatccacgccggttcctgaagtggttcaggagcttccattaacttcgcctgtggatgacttcaggcagcctcgttacagcagcggtggtaactttgagacaccttcaaaaagagcacctgcaaagggaagagcaggaaggtcaaagagaacagagcaagatcactatgagacagactacacaactggcggcgagtcctgtgatgagctggaggaggactggatcagggaatatccacctatcacttcagatcaacaaagacaactgtacaagaggaattttgacactggcctacaggaatacaagagcttacaatcagaacttgatgagatcaataaagaactctcccgtttggataaagaattggatgactatagagaagaaagtgaagagtacatggctgctgctgatgaatacaatagactgaagcaagtgaagggatctgcagattacaaaagtaagaagaatcattgcaagcagttaaagagcaaattgtcacacatcaagaagatggttggagactatgatagacagaaaacatagaaggctgatgccaagttgtttgagaaattaagtatctgacatctctgcaatcttctcagaaggcaaatgactttggaccataaccccggaagccaaacctctgtgagcatcacaaagttttggttgctttaacatcatcagtattgaagcattttataaatcgcttttgataatcaactgggctgaacactccaattaaggattttatgctttaaacattggttcttgtattaagaatgaaatactgtttgaggtttttaagccttaaaggaaggttctggtgtgaactaaactttcacaccccagacgatgtcttcatacctacatgtatttgtttgcataggtgatctcatttaatcctctcaaccacctttcagataactgttatttataatcacttttttccacataaggaaactgggttcctgcaatgaagtctctgaagtgaaactgcttgtttcctagcacacacttttggttaagtctgttttatgacttcattaataataaattccctggcctttcatattttagctactatatatgtgatgatctaccagcctccctattttttttctgttatataaatggttaaaagaggtttttcttaaataataaagatcatgtaaaagtaaaaaaaaaa

SEQ ID NO: 79 - DNA, 7193 bp, Homo sapiens
agaataagggcagggaccgcggctcctatctcttggtgatccccttccccattccgcccccgcctcaacgcccagcacagtgccctgcacacagtagtcgctcaataaatgttcgtggatgatgatgatgatgatgatgaaaaaaatgcagcatcaacggcagcagcaagcggaccacgcgaacgaggcaaactatgcaagaggcaccagacttcctctttctggtgaaggaccaacttctcagccgaatagctccaagcaaactgtcctgtcttggcaagctgcaatcgatgctgctagacaggccaaggctgcccaaactatgagcacctctgcacccccacctgtaggatctctctcccaaagaaaacgtcagcaatacgccaagagcaaaaaacagggtaactcgtccaacagccgacctgcccgcgcccttttctgtttatcactcaataaccccatccgaagagcctgcattagtatagtggaatggaaaccatttgacatatttatattattggctatttttgccaattgtgtggccttagctatttacatcccattccctgaagatgattctaattcaacaaatcataacttggaaaaagtagaatatgccttcctgattatttttacagtcgagacatttttgaagattatagcgtatggattattgctacatcctaatgcttatgttaggaatggatggaatttactggattttgttatagtaatagtaggattgtttagtgtaattttggaacaattaaccaaagaaacagaaggcgggaaccactcaagcggcaaatctggaggctttgatgtcaaagccctccgtgcctttcgagtgttgcgaccacttcgactagtgtcaggggtgcccagtttacaagttgtcctgaactccattataaaagccatggttcccctccttcacatagcccttttggtattatttgtaatcataatctatgctattataggattggaactttttattggaaaaatgcacaaaacatgtttttttgctgactcagatatcgtagctgaagaggacccagctccatgtgcgttctcagggaatggacgccagtgtactgccaatggcacggaatgtaggagtggctgggttggcccgaacggaggcatcaccaactttgataactttgcctttgccatgcttactgtgtttcagtgcatcaccatggagggctggacagacgtgctctactgggtaaatgatgcgataggatgggaatggccatgggtgtattttgttagtctgatcatccttggctcatttttcgtccttaacctggttcttggtgtccttagtggagaattctcaaaggaaagagagaaggcaaaagcacggggagatttccagaagctccgggagaagcagcagctggaggaggatctaaagggctacttggattggatcacccaagctgaggacatcgatccggagaatgaggaagaaggaggagaggaaggcaaacgaaatactagcatgcccaccagcgagactgagtctgtgaacacagagaacgtcagcggtgaaggcgagaaccgaggctgctgtggaagtctctggtgctggtggagacggagaggcgcggccaaggcggggccctctgggtgtcggcggtggggtcaagccatctcaaaatccaaactcagccgacgctggcgtcgctggaaccgattcaatcgcagaagatgtagggccgccgtgaagtctgtcacgttttactggctggttatcgtcctggtgtttctgaacaccttaaccatttcctctgagcactacaatcagccagattggttgacacagattcaagatattgccaacaaagtcctcttggctctgttcacctgcgagatgctggtaaaaatgtacagcttgggcctccaagcatatttcgtctctcttttcaaccggtttgattgcttcgtggtgtgtggtggaatcactgagacgatcctggtggaactggaaatcatgtctcccctggggatctctgtgtttcggtgtgtgcgcctcttaagaatcttcaaagtgaccaggcactggacttccctgagcaacttagtggcatccttattaaactccatgaagtccatcgcttcgctgttgcttctgctttttctcttcattatcatcttttccttgcttgggatgcagctgtttggcggcaagtttaattttgatgaaacgcaaaccaagcggagcacctttgacaatttccctcaagcacttctcacagtgttccagatcctgacaggcgaagactggaatgctgtgatgtacgatggcatcatggcttacgggggcccatcctcttcaggaatgatcgtctgcatctacttcatcatcctcttcatttgtggtaactatattctactgaatgtcttcttggccatcgctgtagacaatttggctgatgctgaaagtctgaacactgctcagaaagaagaagcggaagaaaaggagaggaaaaagattgccagaaaagagagcctagaaaataaaaagaacaacaaaccagaagtcaaccagatagccaacagtgacaacaaggttacaattgatgactatagagaagaggatgaagacaaggacccctatccgccttgcgatgtgccagtaggggaagaggaagaggaagaggaggaggatgaacctgaggttcctgccggaccccgtcctcgaaggatctcggagttgaacatgaaggaaaaaattgcccccatccctgaagggagcgctttcttcattcttagcaagaccaacccgatccgcgtaggctgccacaagctcatcaaccaccacatcttcaccaacctcatccttgtcttcatcatgctgagcagcgctgccctggccgcagaggaccccatccgcagccactccttccggaacacgatactgggttactttgactatgccttcacagccatctttactgttgagatcctgttgaagatgacaacttttggagctttcctccacaaaggggccttctgcaggaactacttcaatttgctggatatgctggtggttggggtgtctctggtgtcatttgggattcaatccagtgccatctccgttgtgaagattctgagggtcttaagggtcctgcgtcccctcagggccatcaacagagcaaaaggacttaagcacgtggtccagtgcgtcttcgtggccatccggaccatcggcaacatcatgatcgtcactaccctcctgcagttcatgtttgcctgtatcggggtccagttgttcaaggggaagttctatcgctgtacggatgaagccaaaagtaaccctgaagaatgcaggggacttttcatcctctacaaggatggggatgttgacagtcctgtggtccgtgaacggatctggcaaaacagtgatttcaacttcgacaacgtcctctctgctatgatggcgctcttcacagtctccacgtttgagggctggcctgcgttgctgtataaagccatcgactcgaatggagagaacatcggcccaatctacaaccaccgcgtggagatctccatcttcttcatcatctacatcatcattgtagctttcttcatgatgaacatctttgtgggctttgtcatcgttacatttcaggaacaaggagaaaaagagtataagaactgtgagctggacaaaaatcagcgtcagtgtgttgaatacgccttgaaagcacgtcccttgcggagatacatccccaaaaacccctaccagtacaagttctggtacgtggtgaactcttcgcctttcgaatacatgatgtttgtcctcatcatgctcaacacactctgcttggccatgcagcactacgagcagtccaagatgttcaatgatgccatggacattctgaacatggtcttcaccggggtgttcaccgtcgagatggttttgaaagtcatcgcatttaagcctaaggggtattttagtgacgcctggaacacgtttgactccctcatcgtaatcggcagcattatagacgtggccctcagcgaagcggacccaactgaaagtgaaaatgtccctgtcccaactgctacacctgggaactctgaagagagcaatagaatctccatcacctttttccgtcttttccgagtgatgcgattggtgaagcttctcagcaggggggaaggcatccggacattgctgtggacttttattaagtcctttcaggcgctcccgtatgtggccctcctcatagccatgctgttcttcatctatgcggtcattggcatgcagatgtttgggaaagttgccatgagagataacaaccagatcaataggaacaataacttccagacgtttccccaggcggtgctgctgctcttcaggtgtgcaacaggtgaggcctggcaggagatcatgctggcctgtctcccagggaagctctgtgaccctgagtcagattacaaccccggggaggagtatacatgtgggagcaactttgccattgtctatttcatcagtttttacatgctctgtgcatttctgatcatcaatctgtttgtggctgtcatcatggataatttcgactatctgacccgggactggtctattttggggcctcaccatttagatgaattcaaaagaatatggtcagaatatgaccctgaggcaaagggaaggataaaacaccttgatgtggtcactctgcttcgacgcatccagcctcccctggggtttgggaagttatgtccacacagggtagcgtgcaagagattagttgccatgaacatgcctctcaacagtgacgggacagtcatgtttaatgcaaccctgtttgctttggttcgaacggctcttaagatcaagaccgaagggaacctggagcaagctaatgaagaacttcgggctgtgataaagaaaatttggaagaaaaccagcatgaaattacttgaccaagttgtccctccagctggtgatgatgaggtaaccgtggggaagttctatgccactttcctgatacaggactactttaggaaattcaagaaacggaaagaacaaggactggtgggaaagtaccctgcgaagaacaccacaattgccctacaggcgggattaaggacactgcatgacattgggccagaaatccggcgtgctatatcgtgtgatttgcaagatgacgagcctgaggaaacaaaacgagaagaagaagatgatgtgttcaaaagaaatggtgccctgcttggaaaccatgtcaatcatgttaatagtgataggagagattcccttcagcagaccaataccacccaccgtcccctgcatgtccaaaggccttcaattccacctgcaagtgatactgagaaaccgctgtttcctccagcaggaaattcggtgtgtcataaccatcataaccataattccataggaaagcaagttcccacctcaacaaatgccaatctcaataatgccaatatgtccaaagctgcccatggaaagcggcccagcattgggaaccttgagcatgtgtctgaaaatgggcatcattcttcccacaagcatgaccgggagcctcagagaaggtccagtgtgaaaagaacccgctattatgaaacttacattaggtccgactcaggagatgaacagctcccaactatttgccgggaagacccagagatacatggctatttcagggacccccactgcttgggggagcaggagtatttcagtagtgaggaatgctacgaggatgacagctcgcccacctggagcaggcaaaactatggctactacagcagatacccaggcagaaacatcgactctgagaggccccgaggctaccatcatccccaaggattcttggaggacgatgactcgcccgtttgctatgattcacggagatctccaaggagacgcctactacctcccaccccagcatcccaccggagatcctccttcaactttgagtgcctgcgccggcagagcagccaggaagaggtcccgtcgtctcccatcttcccccatcgcacggccctgcctctgcatctaatgcagcaacagatcatggcagttgccggcctagattcaagtaaagcccagaagtactcaccgagtcactcgacccggtcgtgggccacccctccagcaacccctccctaccgggactggacaccgtgctacacccccctgatccaagtggagcagtcagaggccctggaccaggtgaacggcagcctgccgtccctgcaccgcagctcctggtacacagacgagcccgacatctcctaccggactttcacaccagccagcctgactgtccccagcagcttccggaacaaaaacagcgacaagcagaggagtgcggacagcttggtggaggcagtcctgatatccgaaggcttgggacgctatgcaagggacccaaaatttgtgtcagcaacaaaacacgaaatcgctgatgcctgtgacctcaccatcgacgagatggagagtgcagccagcaccctgcttaatgggaacgtgcgtccccgagccaacggggatgtgggccccctctcacaccggcaggactatgagctacaggactttggtcctggctacagcgacgaagagccagaccctgggagggatgaggaggacctggcggatgaaatgatatgcatcaccaccttgtagcccccagcgaggggcagactggctctggcctcaggtggggcgcaggagagccaggggaaaagtgcctcatagttaggaaagtttaggcactagttgggagtaatattcaattaattagacttttgtataagagatgtcatgcctcaagaaagccataaacctggtaggaacaggtcccaagcggttgagcctggcagagtaccatgcgctcggccccagctgcaggaaacagcaggccccgccctctcacagaggatgggtgaggaggccagacctgccctgccccattgtccagatgggcactgctgtggagtctgcttctcccatgtaccagggcaccaggcccacccaactgaaggcatggcggcggggtgcaggggaaagttaaaggtgatgacgatcatcacacctcgtgtcgttacctcagccatcggtctagcatatcagtcactgggcccaacatatccatttttaaaccctttcccccaaatacactgcgtcctggttcctgtttagctgttctgaaata

SEQ ID NO: 80 - DNA, 2907 bp, Homo sapiens
ggaaccatggagctcagcgtcctcctcttccttgcactcctcacaggcctcttgctactcctggttcagcgtcaccctaactcccatggcaccctcccaccagggccccgccctctgccccttttggggaaccttctgcagatggacagaagaggcctactcaaatcctttctgaggttccgagagaaatatggggacgtcttcacggtacacctgggaccgaggcccgtggtcatgctgtgtggagtagaggccatacgggaggccctggtggacaacgctgaggccttctctggccggggaaaaatcgtcatcatggacccagtctaccagggatatggcatgctctttgccaatggaaaccgctggaaggtgcttcggcgattctctgtgaccaccatgagggacttcgggatgggaaagcggagtgtggaggagcggattcaggacgaggctcagtgtctgatagaggaacttcggaaatccaagggagccctcgtggaccccaccttcctcttccattccattaccgccaacatcatctgctccatcatctttggaaaacgcttccactaccaagatcaagagttcctgaagacgctgaacttgttctgccagagtttcttactcatcagctctatatccagccagctgtttgagctcttctctggcttcttgaaatactttcctggggcacacaggcaagtttacaaaaacctacaggaaatcaatgcttacattggccacagtgtggagaagcaccgtgaaaccctggaccccagcgcccccagggacctcatcgacacctacctgctccacatggaaaaagagaaatccaacccacacagtgaattcagccaccagaacctcatcatcaacacgctctcgctcttctttgctggcactgagaccaccagcaccactctccgctacggcttcctgctcatgctcaaataccctcatgtcgcagagagagtctacaaggagattgaacaggtggttggcccacatcgccctccagcgcttgatgaccgagccaaaatgccatacacagaggcagtcatccgtgagattcagagatttgctgaccttctccccatgggtgtgccccacattgtcacccaacacaccagcttctgagggtacaccatccccaaggacacggaagtatttctcatcctgagcactgctctccgtgacccacactactttgaaaaaccagacgccttcaatcctgaccactttctggatgccaatggggcactgaaaaagaatgaagcttttatccccttctccttagggaagcggatttgtcttggtgaaggcattgcccgtgcggaattgttcctcttcttcaccaccatcctccagaacttctccgtggccagccccgtggctcctgaagacatcgatctgacaccccaggagtgtggtgtgggcaaaatacccccaacataccagatctgcttcctgccccgctgaaggggctgagggaagggggtcaaaggattccagggtcattcagtgtccccacctctgtagataatggctctgactccctgcaacttcctgcctctgagagacctgctgcaagccagcttccttcccttccatggcaccagttgtctgaggtcgcagtgcaaatgagtggaggagtgagattattgaaaattataatatacaaaattatatatatatattttgagacagagtctcactcagttgcccaggctggagtgcagtggcgtgatctcggctcactgcaacctccacccccggggttcaagaaattctcctgcctcagcctccctagtagctgggattacaggtgtgtgctaccatgcctggctaatttttgtatttttagtagagatggggtttcaccgtgttggccaggctgatctcaaactcctgaactcaagtgattcacccaccttagcctcccaaagtgctgggattacaggtgtgagtcaccatgcccggccatgtatatatataattttaaaaattaagatgaaattcacataaaataaaattagccattttaaagtgtacaatttagtggtgtgtggttcattcacaaagctgtacaaccaccaccatctagttccaaacattttctttttttctgagacggagtctcactctgtcacccaggttcgagttcagtggtcttgaactcctgatgtcaggtgattctcctagttccaaatgttttcattatctctcccccaacaaaacccatacctatcaagctgtcactccccataccccattctctttttcatctcagcccctgtcaatctggtttttgtccttatggacttaccaattctgaatatttcctataaacagaatcacacaatatttgattttttttttaaaactaagccttgctctgtctcccaggctggagtgctgtggcgtgattttggttcactgcaacctccgccttccaagttcaagagattctcctgcctcagcttccaagtagctgggattacaggcatgtggtaccacgcctggctaattttcttgtatttttagtagggacatgttggccaggctggttgtgagctcctggcctcaggtgatccacacgcctcagtgtcccagagtgctgatattacaggcgtaatatgtgatcttttgtgtctggttcctttcacgttgaacgctatttttgaggttcgtgcctgttgtagaccacagtcacacactgctgtagtcttcccccatcctcattcccagctgcctcctcctactgtttccctctatcaaaaagcctccttggcgcaggttccctgagctgtgggattctgcactggtgctttggattccctgatatgttccttcaaatccactgagaattaaataaacatcgctaaagcctgacctccccacgtc

SEQ ID NO: 81 - DNA, 2398 bp, Homo sapiens
cggagggggctcagtccgcagccgccgccgccaccgccgcgcctcggcctcggtgcaggcagcggccgccgccgccgagacagctgcgcgggcgagcatccccacgcagcaccttggaagttgttttcaaccatatccagcctttgccgaatacatcctatctgccacacatccagcgtgaggtccctccagctacaaggtgggcaccatggcggagaagtttgactgccactactgcagggatcccttgcaggggaagaagtatgtgcaaaaggatggccaccactgctgcctgaaatgctttgacaagttctgtgccaacacctgtgtggaatgccgcaagcccatcggtgcggactccaaggaggtgcactataagaaccgcttctggcatgacacctgcttccgctgtgccaagtgccttcaccccttggccaatgagacctttgtggccaaggacaacaagatcctgtgcaacaagtgcaccactcgggaggactcccccaagtgcaaggggtgcttcaaggccattgtggcaggagatcaaaacgtggagtacaaggggaccgtctggcacaaagactgcttcacctgtagtaactgcaagcaagtcatcgggactggaagcttcttccctaaaggggaggacttctactgcgtgacttgccatgagaccaagtttgccaagcattgcgtgaagtgcaacaaggccatcacatctggaggaatcacttaccaggatcagccctggcatgccgattgctttgtgtgtgttacctgctctaagaagctggctgggcagcgtttcaccgctgtggaggaccagtattactgcgtggattgctacaagaactttgtggccaagaagtgtgctggatgcaagaaccccatcactgggtttggtaaaggctccagtgtggtggcctatgaaggacaatcctggcacgactactgcttccactgcaaaaaatgctccgtgaatctggccaacaagcgctttgttttccaccaggagcaagtgtattgtcccgactgtgccaaaaagctgtaaactgacaggggctcctgtcctgtaaaatggcatttgaatctcgttctttgtgtccttactttctgccctataccatcaataggggaagagtggtccttcccttctttaaagttctccttccgtcttttctcccattttacagtattactcaaataagggcacacagtgatcatattagcatttagcaaaaagcaaccctgcagcaaagtgaatttctgtccggctgcaatttaaaaatgaaaacttaggtagattgactcttctgcatgtttctcatagagcagaaaagtgctaatcatttagccacttagtgatgtaagcaagaagcataggagataaaacccccactgagatgcctctcatgcctcagctgggacccaccgtgtagacacacgacatgcaagagttgcagcggctgctccaactcactgctcaccctcttctgtgagcaggaaaagaaccctactgacatgcatggtttaacttcctcatcagaactctgcccttccttctgttcttttgtgctttcaaataactaacacgaacttccagaaaattaacatttgaacttagctgtaattctaaactgacctttccccgtactaacgtttggtttccccgtgtggcatgttttctgagcgttcctactttaaagcatggaacatgcaggtgatttgggaagtgtagaaagacctgagaaaacgagcctgtttcagaggaacatcgtcacaacgaatacttctggaagcttaacaaaactaaccctgctgtcctttttattgtttttaattaatatttttgttttaattgatagcaaaatagtttatgggtttggaaacttgcatgaaaatattttagccccctcagatgttcctgcagtgctgaaattcatcctacggaagtaaccgcaaaactctagagggggagttgagcaggcgccagggctgtcatcaacatggatatgacatttcacaacagtgactagttgaatcccttgtaacgtagtagttgtctgctctttgtccatgtgttaatgaggactgcaaagtcccttctgttgtgattcctaggacttttcctcaagaggaaatctggatttccacctaccgcttacctgaaatgcaggatcacctacttactgtattctacattattatatgacatagtataatgagacaatatcaaaagtaaacatgtaatgacaatacatactaacattcttgtaggagtggttagagaagctgatgcctcatttctacattctgtcattagctattatcatctaacgtttcagtgtatccttacagaaataaagcagcatatgaaaaaaaaaaaaaaaaaaaaaaa

SEQ ID NO: 82 - DNA, 2197 bp, Homo sapiens
gtcgccgctgccgggttgccagcggagtcgcgcgtcgggagctacgtagggcagagaagtcatggcttctccgtccaaaggcaatgacttgttttcgcccgacgaggagggcccagcagtggtggccggaccaggcccggggcctgggggcgccgagggggccgcggaggagcgccgcgtcaaggtctccagcctgcccttcagcgtggaggcgctcatgtccgacaagaagccgcccaaggaggcgtccccgctgccggccgaaagcgcctcggccggggccaccctgcggccactgctgctgtcggggcacggcgctcgggaagcgcacagccccgggccgctggtgaagcccttcgagaccgcctcggtcaagtcggaaaattcagaagatggagcggcgtggatgcaggaacccggccgatattcgccgccgccaagacatatgagccctaccacctgcaccctgaggaaacacaagaccaatcggaagccgcgcacgccctttaccacatcccagctcctcgccctggagcgcaagttccgtcagaaacagtacctctccattgcagagcgtgcagagttctccagctctctgaacctcacagagacccaggtcaaaatctggttccagaaccgaagggccaaggcgaaaagactgcaggaggcagaactggaaaagctgaaaatggctgcaaaacctatgctgccctccagcttcagtctccctttccccatcagctcgcccctgcaggcagcgtccatatatggagcatcctacccgttccatagacctgtgcttcccatcccgcctgtgggactctatgccacgccagtgggatatggcatgtaccacctgtcctaaggaagaccagatcaatagactccatgatggatgcttgtttcaaagggtttcctctccctctccacgaaggcagtaccagccagtactcctgctctgctaaccctgcgtgcaccaccctaagcggctaggctgacagggccacacgacatagctgaaatttgttctgtaggcggaggcaccaagccctgttttcttggtgtaatcttccagatgcccccttttcctttcacaaagattggctctgatggtttttatgtataaatatatatatataataaaatataatacatttttatacagcagacgtaaaaattcaaattattttaaaaggcaaaatttatatacatatgtgctttttttctatatctcaccttcccaaaagacactgtgtaagtccatttgttgtattttcttaaagagggagacaaattatttgcaaaatgtgctaaagtcaatgatttttacgggattattgacttctgcttatggaaaacaaagaaacagacacaatgcacacagaaaatattagatatggagagattattcaaagtgaaggggacacatcatatttctgcattttacttgcattaaaagaaacctctttatatactacagttgttcctatctctcccccgccccccaccgccccaccacacacatatttttaaagtttttccttttttaagaatatttttgtaagaccaatacctgggatgagaagaatcctgagactgcctggaggtgaggtagaaaattagaaatacttcctaattcttctcaaggctgttggtaactttatttcagataattggagagtaaaatgttaaaacctgttgagaggaattgatggtttctgagaaatactaggtacattcatcctcacagattgcaaaggtgatttgggtgggggtttagtaattttctgcttaaaaaatgagtatcttgtaaccattacctatatgctaaatattcttgaacaattagtagatccagaaagaaaaaaaaatatgctttctctgtgtgtgtacctgttgtatgtcctaaacttattagaaaattttatatacttttttacatgttggggggcagaaggtaaagccatgttttgacttggtgaaaatgggattgtcaaacagcccattaagttccctggtatttcaccttcctgtccatctgtcccctccctccggtatacctttatccctttgaaagggtgcttgtacaatttgatatattttattgaagagttatctcttattctgaattaaattaagcatttgttttattgcagtaaagtttgtccaaactcacaattaaaaaaaaaaaaaaaaa

SEQ ID NO: 83 - DNA, 2201 bp, Homo sapiens
gggggtgggaagagctgaagcaggcgctcttggctcggcgcggcccgctgcaatccgtggaggaacgcgccgccgagccaccatcatgcctgggcacttacaggaaggcttcggctgcgtggtcaccaaccgattcgaccagttatttgacgacgaatcggaccccttcgaggtgctgaaggcagcagagaacaagaaaaaagaagccggcgggggcggcgttgggggccctggggccaagagcgcagctcaggccgcggcccagaccaactccaacgcggcaggcaaacagctgcgcaaggagtcccagaaagaccgcaagaacccgctgccccccagcgttggcgtggttgacaagaaagaggagacgcagccgcccgtggcgcttaagaaagaaggaataagacgagttggaagaagacctgatcaacaacttcagggtgaagggaaaataattgatagaagaccagaaaggcgaccacctcgtgaacgaagattcgaaaagccacttgaagaaaagggtgaaggaggcgaattttcagttgatagaccgattattgaccgacctattcgaggtcgtggtggtcttggaagaggtcgagggggccgtggacgtggaatgggccgaggagatggatttgattctcgtggcaaacgtgaatttgataggcatagtggaagtgatagatctggcctgaagcacgaggacaaacgtggaggtagcggatctcacaactggggaactgtcaaagacgaattaactgacttggatcaatcaaatgtgactgaggaaacacctgaaggtgaagaacatcatccagtggcagacactgaaaataaggagaatgaagttgaagaggtaaaagaggagggtccaaaagagatgactttggatgagtggaaggctattcaaaataaggaccgggcaaaagtagaatttaatatccgaaaaccaaatgaaggtgctgatgggcagtggaagaagggatttgttcttcataaatcaaagagtgaagaggctcatgctgaagattcggttatggaccatcatttccggaagccagcaaatgatataacgtctcagctggagatcaattttggagaccttggccgcccaggacgtggcggcaggggaggacgaggtggacgtgggcgtggtgggcgcccaaaccgtggcagcaggaccgacaagtcaagtgcttctgctcctgatgtggatgacccagaggcattcccagctctggcttaactggatgccataagacaaccctggttcctttgtgaacccttctgttcaaagcttttgcatgcttaaggattccaaacgactaagaaattaaaaaaaaaaagactgtcattcataccattcacacctaaagactgaattttatctgttttaaaaatgaacttctcccgctacacagaagtaacaaatatggtagtcagttttgtatttagaaatgtattggtagcagggatgttttcataattttcagagattatgcattcttcatgaatacttttgtattgctgcttgcaaatatgcatttccaaacttgaaatataggtgtgaacagtgtgtaccagtttaaagctttcacttcatttgtgttttttaattaaggacttagaagttcccccaattacaaactggttttaaatattggacatactggttttaatacctgctttgcatattcacacatggtcaactgggacatgttaaactttgatttgtcaaattttatgctgtgtggaatactaactatatgtattttaacttagttttaatattttcattttgggggaaaaatcttttttcacttctcatgatagctgttatatatatatgctaaatctttatatacagaaatatcagtacttgaacaaattcaaagcacatttggtttattaacccttgctccttgcatggctcattaggttcaaattataactaatttacattttcagctatatttactttttaaatgcttgagtttcccattttaaaatctaaactagacatcttaattggtgaaagttgtttaaactacttattgttggtaggcacatcgtgtcaagtgaagtagttttataggtatgggttttttctcccccttcaccagggtgggtggaataagttgatttggccaatgtgtaatatttaaactgttctgtaaaataaaaaaaaaaaaaaaaaa

SEQ ID NO: 84 - DNA, 1233 bp, Homo sapiens
gtttgcttcaccttctgccaggattgtaagtttcctgaggcctccccagtcctgcggaactggctccggctggcacctgaggagcggcgtgaccccgagggcccagggagctgcccggctggcctaggcaggcagccgcaccatggccagcacggccgtgcagcttctgggcttcctgctcagcttcctgggcatggtgggcacgttgatcaccaccatcctgccgcactggcggaggacagcgcacgtgggcaccaacatcctcacggccgtgtcctacctgaaagggctctggatggagtgtgtgtggcacagcacaggcatctaccagtgccagatctaccgatccctgctggcgctgccccaagacctccaggctgcccgcgccctcatggtcatctcctgcctgctctcgggcatagcctgcgcctgcgccgtcatcgggatgaagtgcacgcgctgcgccaagggcacacccgccaagaccacctttgccatcctcggcggcaccctcttcatcctggccggcctcctgtgcatggtggccgtctcctggaccaccaacgacgtggtgcagaacttctacaacccgctgctgcccagcggcatgaagtttgagattggccaggccctgtacctgggcttcatctcctcgtccctctcgctcattggtggcaccctgctttgcctgtcctgccaggacgaggcaccctacaggccctaccaggccccgcccagggccaccacgaccactgcaaacaccgcacctgcctaccagccaccagctgcctacaaagacaatcgggccccctcagtgacctcggccacgcacagcgggtacaggctgaacgactacgtgtgagtccccacagcctgcttctcccctgggctgctgtgggctgggtccccggcgggactgtcaatggaggcaggggttccagcacaaagtttacttctgggcaatttttgtatccaaggaaataatgtgaatgcgaggaaatgtctttagagcacagggacagagggggaaataagaggaggagaaagctctctataccaaagactgaaaaaaaaaatcctgtctgtttttgtatttattatatatatttatgtgggtgatttgataacaagtttaatataaagtgacttgggagtttggtcagtggggttggtttgtgatccaggaataaaccttgcggatgtggctgtttatgaaaaaaaaaaaaaaaaaaa

SEQ ID NO: 85 - DNA, 3139 bp, Homo sapiens
ggccgaggaggaagtggcggcggcggcggcgggactgcgcgccccagctccgatccccgttccgcgtccccgccgccgggaggaggtgcccactcgctcgcggcgcgcgccggccgccagactcggcctgtgggcgatttcctccggacccaggctccccgcccgaggaggaagatgcagacctttctgaaagggaagagagttggctactggctgagcgagaagaaaatcaagaagctgaatttccaggccttcgccgagctgtgcaggaagcgagggatggaggttgtgcagctgaaccttagccggccgatcgaggagcagggccccctggacgtcatcatccacaagctgactgacgtcatccttgaagccgaccagaatgatagccagtccctggagctggtgcacaggttccaggagtacatcgatgcccaccctgagaccatcgtcctggacccgctccctgccatcagaaccctgcttgaccgctccaagtcctatgagctcatccggaagattgaggcctacatggaagacgacaggatctgctcgccacccttcatggagctcacgagcctgtgcggggatgacaccatgcggctgctggagaagaacggcttgactttcccattcatttgcaaaaccagagtggctcatggcaccaactctcacgagatggctatcgtgttcaaccaggagggcctgaacgccatccagccaccctgcgtggtccagaatttcatcaaccacaacgccgtcctgtacaaggtgttcgtggttggcgagtcctacaccgtggtccagaggccctcactcaagaacttctccgcaggcacatcagaccgtgagtccatcttcttcaacagccacaacgtgtcaaagccggagtcgtcatcggtcctgacggagctggacaagatcgagggcgtgttcgagcggccgagcgacgaggtcatccgggagctctcccgggccctgcggcaggcactgggcgtgtcactcttcggcatcgacatcatcatcaacaaccagacagggcagcacgccgtcattgacatcaatgccttcccaggctacgagggcgtgagcgagttcttcacagacctcctgaaccacatcgccactgtcctgcagggccagagcacagccatggcagccacaggggacgtggccctgctgaggcacagcaagcttctggccgagccggcgggcggcctggtgggcgagcggacatgcagcgccagccccggctgctgcggcagcatgatgggccaggacgcgccctggaaggctgaggccgacgcgggcggcaccgccaagctgccgcaccagagactcggctgcaacgccggcgtgtcgcccagcttccagcagcattgtgtggcctccctggccaccaaggcctcctcccagtagccacggagccgggacccagaggggcagcgcagggcgcagagcacacccgctgggccagcagctcccaacggcgatgctactactaagaatccccagtgatctgattcttctgttttttaatttttaacctgattctctgatgtcatgatctaaatgaggggtagtgggggatggaagagagtaccaggtggtccaccgttggggagtggggccgtccgcctgctctctactgtgcagacctcctaactgagtttacacacgcttgtgtttgcaacactaggtctggatgggaggtgaggggtgtgcgtatggctgccatgccggtgtctgtgcacatccctgtctgttggtctccatggccactgtggaccgggacccttgggggaagcctgcccatgtcgggctgtgggaggctgatcggtgcatgtgagagtggcttcccttctgcctgactccccactccctgacctgccccttccttgtttttcctcctactggtctccaccaaggctttgttagcccccaccctgcctggtgtgcagctaacccctccctccccacagccagaggaggccacagacccctcaggggagttccgcgctggtgtctgggctgtgctccctcactaaagggaaggaaaggaagctgggcgtcctctgggccccccaacacacgtcccatttagccctgcacagcggtctccttcccctaagccagcactgctgctccctggagcccgggaaggaggctgcctggctggaggcccgagccgatggcgcctgtgctgaggatttgtgctgtgatttgggcaaatcattccaggtctttgggcctccacccccttgtctctagtggacatttgagatcagagagcaccacagggctggctttgtgccctaacccctgggatgcagcctgcctttccataaagtcacctaggtgaggataggcgcgggagcctcggcatgacaccatggagatcggggccctcttcccagtgggttcactccttttcacacctgctgggtccctcctcacccagcaggcctggtccacctctcattgcaagccccaagcactgagccagcaggtgccagggagccacccgccccccatcgcttctgcacacctcagactcaccccatcaccttggcagcaaagcactggctctgccgtctgacccctgatccaggcagccccctctgcagagaaaagggttggggagaagcctctgcagtcctggaagatgtggggtgctgggtgagaggcatcagcccccacaagtatgtttttgtgtcttaagatagcagtttactttgaaaaagtgaaaaaggcttccgggctgtcctctgcccagtgagatggaggacgctagagaaagtgctgagtgtcccgagagaggcccccgagccagtgcatggaggtccttcggcctggctcagctgggctgcaggatgcccactttgaggagggaggcacagggcttgggcgaggggcagaggccatcagaactgcccggcttttttggaaactgaggacccaacaactaaccacgtttacacgacttgagttttgaaccccgattaatgtctgtacgtcacctttcctagttctgaccctgagccctggggaacaggaaagcgtggctggcctcttgcactgctttgtctccaaaataaactactgaaatcaaaccgcaaaaaaaaaaaaaaaaaaaaaa

SEQ ID NO: 86 - DNA, 4530 bp, Homo sapiens
aattctcgagctcgtcgaccggtcgacgagctcgagggtcgacgagctcgagggcgcgcgcccggcccccacccctcgcagcaccccgcgccccgcgccctcccagccgggtccagccggagccatggggccggagccgcagtgagcaccatggagctggcggccttgtgccgctgggggctcctcctcgccctcttgccccccggagccgcgagcacccaagtgtgcaccggcacagacatgaagctgcggctccctgccagtcccgagacccacctggacatgctccgccacctctaccagggctgccaggtggtgcagggaaacctggaactcacctacctgcccaccaatgccagcctgtccttcctgcaggatatccaggaggtgcagggctacgtgctcatcgctcacaaccaagtgaggcaggtcccactgcagaggctgcggattgtgcgaggcacccagctctttgaggacaactatgccctggccgtgctagacaatggagacccgctgaacaataccacccctgtcacaggggcctccccaggaggcctgcgggagctgcagcttcgaagcctcacagagatcttgaaaggaggggtcttgatccagcggaacccccagctctgctaccaggacacgattttgtggaaggacatcttccacaagaacaaccagctggctctcacactgatagacaccaaccgctctcgggcctgccacccctgttctccgatgtgtaagggctcccgctgctggggagagagttctgaggattgtcagagcctgacgcgcactgtctgtgccggtggctgtgcccgctgcaaggggccactgcccactgactgctgccatgagcagtgtgctgccggctgcacgggccccaagcactctgactgcctggcctgcctccacttcaaccacagtggcatctgtgagctgcactgcccagccctggtcacctacaacacagacacgtttgagtccatgcccaatcccgagggccggtatacattcggcgccagctgtgtgactgcctgtccctacaactacctttctacggacgtgggatcctgcaccctcgtctgccccctgcacaaccaagaggtgacagcagaggatggaacacagcggtgtgagaagtgcagcaagccctgtgcccgagtgtgctatggtctgggcatggagcacttgcgagaggtgagggcagttaccagtgccaatatccaggagtttgctggctgcaagaagatctttgggagcctggcatttctgccggagagctttgatggggacccagcctccaacactgccccgctccagccagagcagctccaagtgtttgagactctggaagagatcacaggttacctatacatctcagcatggccggacagcctgcctgacctcagcgtcttccagaacctgcaagtaatccggggacgaattctgcacaatggcgcctactcgctgaccctgcaagggctgggcatcagctggctggggctgcgctcactgagggaactgggcagtggactggccctcatccaccataacacccacctctgcttcgtgcacacggtgccctgggaccagctctttcggaacccgcaccaagctctgctccacactgccaaccggccagaggacgagtgtgtgggcgagggcctggcctgccaccagctgtgcgcccgagggcactgctggggtccagggcccacccagtgtgtcaactgcagccagttccttcggggccaggagtgcgtggaggaatgccgagtactgcaggggctccccagggagtatgtgaatgccaggcactgtttgccgtgccaccctgagtgtcagccccagaatggctcagtgacctgttttggaccggaggctgaccagtgtgtggcctgtgcccactataaggaccctcccttctgcgtggcccgctgccccagcggtgtgaaacctgacctctcctacatgcccatctggaagtttccagatgaggagggcgcatgccagccttgccccatcaactgcacccactcctgtgtggacctggatgacaagggctgccccgccgagcagagagccagccctctgacgtccatcgtctctgcggtggttggcattctgctggtcgtggtcttgggggtggtctttgggatcctcatcaagcgacggcagcagaagatccggaagtacacgatgcggagactgctgcaggaaacggagctggtggagccgctgacacctagcggagcgatgcccaaccaggcgcagatgcggatcctgaaagagacggagctgaggaaggtgaaggtgcttggatctggcgcttttggcacagtctacaagggcatctggatccctgatggggagaatgtgaaaattccagtggccatcaaagtgttgagggaaaacacatcccccaaagccaacaaagaaatcttagacgaagcatacgtgatggctggtgtgggctccccatatgtctcccgccttctgggcatctgcctgacatccacggtgcagctggtgacacagcttatgccctatggctgcctcttagaccatgtccgggaaaaccgcggacgcctgggctcccaggacctgctgaactggtgtatgcagattgccaaggggatgagctacctggaggatgtgcggctcgtacacagggacttggccgctcggaacgtgctggtcaagagtcccaaccatgtcaaaattacagacttcgggctggctcggctgctggacattgacgagacagagtaccatgcagatgggggcaaggtgcccatcaagtggatggcgctggagtccattctccgccggcggttcacccaccagagtgatgtgtggagttatggtgtgactgtgtgggagctgatgacttttggggccaaaccttacgatgggatcccagcccgggagatccctgacctgctggaaaagggggagcggctgccccagccccccatctgcaccattgatgtctacatgatcatggtcaaatgttggatgattgactctgaatgtcggccaagattccgggagttggtgtctgaattctcccgcatggccagggacccccagcgctttgtggtcatccagaatgaggacttgggcccagccagtcccttggacagcaccttctaccgctcactgctggaggacgatgacatgggggacctggtggatgctgaggagtatctggtaccccagcagggcttcttctgtccagaccctgccccgggcgctgggggcatggtccaccacaggcaccgcagctcatctaccaggagtggcggtggggacctgacactagggctggagccctctgaagaggaggcccccaggtctccactggcaccctccgaaggggctggctccgatgtatttgatggtgacctgggaatgggggcagccaaggggctgcaaagcctccccacacatgaccccagccctctacagcggtacagtgaggaccccacagtacccctgccctctgagactgatggctacgttgcccccctgacctgcagcccccagcctgaatatgtgaaccagccagatgttcggccccagcccccttcgccccgagagggccctctgcctgctgcccgacctgctggtgccactctggaaagggccaagactctctccccagggaagaatggggtcgtcaaagacgtttttgcctttgggggtgccgtggagaaccccgagtacttgacaccccagggaggagctgcccctcagccccaccctcctcctgccttcagcccagccttcgacaacctctattactgggaccaggacccaccagagcggggggctccacccagcaccttcaaagggacacctacggcagagaacccagagtacctgggtctggacgtgccagtgtgaaccagaaggccaagtccgcagaagccctgatgtgtcctcagggagcagggaaggcctgacttctgctggcatcaagaggtgggagggccctccgaccacttccaggggaacctgccatgccaggaacctgtcctaaggaaccttccttcctgcttgagttcccagatggctggaaggggtccagcctcgttggaagaggaacagcactggggagtctttgtggattctgaggccctgcccaatgagactctagggtccagtggatgccacagcccagcttggccctttccttccagatcctgggtactgaaagccttagggaagctggcctgagaggggaagcggccctaagggagtgtctaagaacaaaagcgacccattcagagactgtccctgaaacctagtactgccccccatgaggaaggaacagcaatggtgtcagtatccaggctttgtacagagtgcttttctgtttagtttttactttttttgttttgtttttttaaagacgaaataaagacccaggggagaatgggtgttgtatggggaggcaagtgtggggggtccttctccacacccactttgtccatttgcaaatatattttggaaaac

SEQ ID NO: 87 - DNA, 2629 bp, Homo sapiens
acttgtcatggcgactgtccagctttgtgccaggagcctcgcaggggttgatgggattggggttttcccctcccatgtgctcaagactggcgctaaaagttttgagcttctcaaaagtctagagccaccgtccagggagcaggtagctgctgggctccggggacactttgcgttcgggctgggagcgtgctttccacgacggtgacacgcttccctggattggcagccagactgccttccgggtcactgccatggaggagccgcagtcagatcctagcgtcgagccccctctgagtcaggaaacattttcagacctatggaaactacttcctgaaaacaacgttctgtcccccttgccgtcccaagcaatggatgatttgatgctgtccccggacgatattgaacaatggttcactgaagacccaggtccagatgaagctcccagaatgccagaggctgctccccgcgtggcccctgcaccagcagctcctacaccggcggcccctgcaccagccccctcctggcccctgtcatcttctgtcccttcccagaaaacctaccagggcagctacggtttccgtctgggcttcttgcattctgggacagccaagtctgtgacttgcacgtactcccctgccctcaacaagatgttttgccaactggccaagacctgccctgtgcagctgtgggttgattccacacccccgcccggcacccgcgtccgcgccatggccatctacaagcagtcacagcacatgacggaggttgtgaggcgctgcccccaccatgagcgctgctcagatagcgatggtctggcccctcctcagcatcttatccgagtggaaggaaatttgcgtgtggagtatttggatgacagaaacacttttcgacatagtgtggtggtgccctatgagccgcctgaggttggctctgactgtaccaccatccactacaactacatgtgtaacagttcctgcatgggcggcatgaaccggaggcccatcctcaccatcatcacactggaagactccagtggtaatctactgggacggaacagctttgaggtgcgtgtttgtgcctgtcctgggagagaccggcgcacagaggaagagaatctccgcaagaaaggggagcctcaccacgagctgcccccagggagcactaagcgagcactgcccaacaacaccagctcctctccccagccaaagaagaaaccactggatggagaatatttcacccttcagatccgtgggcgtgagcgcttcgagatgttccgagagctgaatgaggccttggaactcaaggatgcccaggctgggaaggagccaggggggagcagggctcactccagccacctgaagtccaaaaagggtcagtctacctcccgccataaaaaactcatgttcaagacagaagggcctgactcagactgacattctccacttcttgttccccactgacagcctcccacccccatctctccctcccctgccattttgggttttgggtctttgaacccttgcttgcaataggtgtgcgtcagaagcacccaggacttccatttgctttgtcccggggctccactgaacaagttggcctgcactggtgttttgttgtggggaggaggatggggagtaggacataccagcttagattttaaggtttttactgtgagggatgtttgggagatgtaagaaatgttcttgcagttaagggttagtttacaatcagccacattctaggtaggtaggggcccacttcaccgtactaaccagggaagctgtccctcatgttgaattttctctaacttcaaggcccatatctgtgaaatgctggcatttgcacctacctcacagagtgcattgtgagggttaatgaaataatgtacatctggccttgaaaccaccttttattacatggggtctaaaacttgacccccttgagggtgcctgttccctctccctctccctgttggctggtgggttggtagtttctacagttgggcagctggttaggtagagggagttgtcaagtcttgctggcccagccaaaccctgtctgacaacctcttggtcgaccttagtacctaaaaggaaatctcaccccatcccacaccctggaggatttcatctcttgtatatgatgatctggatccaccaagacttgttttatgctcagggtcaatttcttttttcttttttttttttttttttctttttctttgagactgggtctcgctttgttgcccaggctggagtggagtggcgtgatcttggcttactgcagcctttgcctccccggctcgagcagtcctgcctcagcctccggagtagctgggaccacaggttcatgccaccatggccagccaacttttgcatgttttgtagagatggggtctcacagtgttgcccaggctggtctcaaactcctgggctcaggcgatccacctgtctcagcctcccagagtgctgggattacaattgtgagccaccacgtggagctggaagggtcaacatcttttacattctgcaagcacatctgcattttcaccccacccttcccctccttctccctttttatatcccatttttatatcgatctcttattttacaataaaactttgctgcca

SEQ ID NO: 88 - DNA, 2496 bp, Homo sapiens
ctctcttgcctgccgccatgtgcctttcgccttctgccgtgattgtgaggcctccccagccatatggaagttcaggatgtctgcccgtggcccggctatcggcatcgacctgggcaccacctattcgtgcgtcggggtcttccaacatggcaaggtggagatcatcgccaacgaccagggcaatcgcaccacccccagctacgtggccttcacggacaccgagcgcctcatcggcgacgccgccaagaaccaggtggccatgaaccccaccaacaccatcttcgacgccaagaggctgattggacggaaattcgaggatgccacagtgcagtcggatatgaaacactggccgttccgggtggtgagcgagggaggcaagcccaaagtgcaagtagagtacaagggggagaccaagaccttcttcccagaggagatatcctccatggtcctcacgaagatgaaggagatcgcggaagcctacctggggggcaaggtgcacagcgcggtcataacggtcccggcctatttcaacgactcgcagcgccaggccaccaaggacgcaggcaccatcacggggctcaatgtgctgcgcatcatcaacgagcccacggcggcggccatcgcctacggcctggacaagaagggctgcgcgggcggcgagaagaacgtgctcatctttgacctgggcggtggcactttcgacgtgtccatcctgaccatcgaggatggcatcttcgaggtgaagtccacggccggcgacacccacctgggcggtgaggacttcgacaaccgcatggtgagccacctggcggaggagttcaagcgcaagcacaagaaggacattgggcccaacaagcgcgccgtgaggcggctgcgcaccgcttgcgagcgcgccaagcgcaccctgagctcgtccacgcaggcgagcatcgagatcgactcgctctacgagggcgtggacttctatacgtccatcacgcgcgcccgcttcgaggagctcaatgccgacctctttcgcgggaccctggagccggtggagaaggcgctgcgcgacgccaagctggacaagggccagatccaggagatcgtgctggtgggcggctccactcgtatccccaagatccagaagctgctgcaggatttcttcaacggcaaggagctgaacaagagcatcaaccccgacgaggcggtggcctatggcgccgcggtgcaggcggccatcctcatcggcgacaaatcagagaatgtgcaggacctgctgctactcgacgtgaccccgttgtcgctgggcatcgagacagctggcggtgtcatgaccccactcatcaagaggaacaccacgatccccaccaagcagacgcagaccttcaccacctactcggacaaccagagcagcgtactggtgcaggtatacgagggcgaacgggccatgaccaaggacaataacctgctgggcaagttcgacctgaccgggattccccctgcgcctcgcggggtcccccaaatcgaggttaccttcgacattgacgccaatggcatccttaacgttaccgccgccgacaagagcaccggtaaggaaaacaaaatcaccatcaccaatgacaaaggtcgtctgagcaaggacgacattgaccggatggtgcaggaggcggagcggtacaaatcggaagatgaggcgaatcgcgaccgagtcgcggccaaaaacgccctggagtcctatacctacaacatcaagcagacggtggaagacgagaaactgaggggcaagattagcgagcaggacaaaaacaagatcctcgacaagtgtcaggaggtgatcaactggctcgaccgaaaccagatggcagagaaagatgagtatgaacacaagcagaaagagctcgaaagagtttgcaaccccatcatcagcaaactttaccaaggtggtcctggcggcggcagcggcggcggcggttcaggagcctccgggggacccaccatcgaagaagtggactaagcttgcactcaagtcagcgtaaacctctttgcctttctctctctctctttttttttgtttgtttctttgaaatgtccttgtgccaagtacgagatctattgttggaagtctttggtatatgcaaatgaaaggagaggtgcaacaacttagtttaattataaaagttccaaagtttgttttttaaaaacattattcgaggtttctctttaatgcattttgcgtgtttgctgacttgagcatttttgattagttcgtgcatggagatttgtttgagatgagaaaccttaagtttgcacacctgttctgtagaagcttggaaacagtaaaatatataggagcttaaattgtttatttttatgtactactttaaaactaaactgaacattgcagtaatgttaaggacaggtatactttttgcaaacaaatgcataaatgcaaatgtaaagtaaagctgaaattgatctcaaaaaaaaaaaaaaaaaaaaaaaaaaaaaaaaaaa

SEQ ID NO: 89 - DNA, 5287 bp, Homo sapiens
ctggccgcggcgtggggacagcgaggcgcactggggcctcccagcgccgggccggccgcgccgtccagcccgaggtctacggctttgcgctccgagcccagaggaagatgcctgccggcaccgagctcgggctgcggggctgaacgcctgtcttccaggcgcacggcagcactgccctcggccggtgtcggtagcggcactcggcgtgccccgggcggacgaagagcgcaggctgggtacaccttgcccgaatcggcggagttcgcagctagcgagggcgggccggccggcccggatgggcgcggggtttgcggcccccgccgggtgctccggagcggcccgggcaccgggggcacgctgagtgccggagccgcggccgcagagagaacttggggcgggggccatgcaccggtgcggagtctagagccgagcggagcgccccgcgggcccgcccgcgtctgcggccgttcgggtcctcacagtccccgcgcccggagttcgcagcgcgctccagacaagatggcgcggccggtccggggagggctcggggccccgcgccgctcgccttgccttctccttctctggctgcttttgcttcggctggagccggtgaccgccgcggccggcccgcgggcgccctgcgcggccgcctgcacttgcgctggggactcgctggactgcggtgggcgcgggctggctgcgttgcccggggacctgccctcctggacgcggagcctaaacctgagttacaacaaactctctgagattgaccctgctggttttgaggacttgccgaacctacaggaagtgtacctcaataataatgagttgacagcggtaccatccctgggcgctgcttcatcacatgtcgtctctctctttctgcagcacaacaagattcgcagcgtggaggggagccagctgaaggcctacctttccttagaagtgttagatctgagtttgaacaacatcacggaagtgcggaacacctgctttccacacggaccgcctataaaggagctcaacctggcaggcaatcggattggcaccctggagttgggagcatttgatggtctgtcacggtcgctgctaactcttcgcctgagcaaaaacaggatcacccagcttcctgtaagagcattcaagctacccaggctgacacaactggacctcaatcggaacaggattcggctgatagagggcctcaccttccaggggctcaacagcttggaggtgctgaagcttcagcgaaacaacatcagcaaactgacagatggggccttctggggactgtccaagatgcatgtgctgcacctggagtacaacagcctggtagaagtgaacagcggctcgctctacggcctcacggccctgcatcagctccacctcagcaacaattccatcgctcgcattcaccgcaagggctggagcttctgccagaagctgcatgagttggtcctgtccttcaacaacctgacacggctggacgaggagagcctggccgagctgagcagcctgagtgtcctgcgtctcagccacaattccatcagccacattgcggagggtgccttcaagggactcaggagcctgcgagtcttggatctggaccataacgagatttcgggcacaatagaggacacgagcggcgccttctcagggctcgacagcctcagcaagctgactctgtttggaaacaagatcaagtctgtggctaagagagcattctcggggctggaaggcctggagcacctgaaccttggagggaatgcgatcagatctgtccagtttgatgcctttgtgaagatgaagaatcttaaagagctccatatcagcagcgacagcttcctgtgtgactgccagctgaagtggctgcccccgtggctaattggcaggatgctgcaggcctttgtgacagccacctgtgcccacccagaatcactgaagggtcagagcattttctctgtgccaccagagagtttcgtgtgcgatgacttcctgaagccacagatcatcacccagccagaaaccaccatggctatggtgggcaaggacatccggtttacatgctcagcagccagcagcagcagctcccccatgacctttgcctggaagaaagacaatgaagtcctgaccaatgcagacatggagaactttgtccacgtccacgcgcaggacggggaagtgatggagtacaccaccatcctgcacctccgtcaggtcactttcgggcacgagggccgctaccaatgtgtcatcaccaaccactttggctccacctattcacataaggccaggctcactgtgaatgtgttgccatcattcaccaaaacgccccacgacataaccatccggaccaccaccatggcccgcctcgaatgtgctgccacaggtcacccaaaccctcagattgcctggcagaaggatggaggcacggatttccccgctgcccgtgagcgacgcatgcatgtcatgccggatgacgacgtgtttttcatcactgatgtgaaaatagatgacgcaggggtttacagctgtactgctcagaactcagccggttctatttcagctaatgccaccctgactgtcctagagaccccatccttggtggtccccttggaagaccgtgtggtatctgtgggagaaacagtggccctccaatgcaaagccacggggaaccctccgccccgcatcacctggttcaagggggaccgcccgctgagcctcactgagcggcaccacctgacccctgacaaccagctcctggtggttcagaacgtggtggcagaggatgcgggccgatatacctgtgagatgtccaacaccctgggcacggagcgagctcacagccagctgagcgtcctgcccgcagcaggctgcaggaaggatgggaccacggtaggcatcttcaccattgctgtcgtgagcagcatcgtcctgacgtcactggtctgggtgtgcatcatctaccagaccaggaagaagagtgaagagtacagtgtcaccaacacagatgaaaccgtcgtgccaccagatgttccaagctacctctcttctcaggggaccctttctgaccgacaagaaaccgtggtcaggaccgagggtgcgggccctcaggccaatgggcacattgagagcaatggtgtgtgtccaagagatgcaagccactttccagagcccgacactcacagcgttgcctgcaggcagccaaagctctgtgctgggtctgcgtatcacaaagagccgtggaaagcgattgagaaagctgaagggacacctgggccacataagatggaacacggtggccgggtcgtatgcagtgactgcaacaccgaagtggactgttactccaggggacaagccttccacccccagcctgtgtccagagacagcgcacagccaagtgcgccaaatggcccggagccgggtgggagtgaccaagagcattctccacatcaccagtgcagcaggactgccgctgggtcctgccccgagtgccaagggtcgctctaccccagtaaccacgatagaatgctgacggctgtgaagaaaaagccaatggcatctctagatgggaaaggggattcttcctggactttagcaaggttgtatcacccggactctacagagctacagcctgcatcttcattaacttcaggcagtccagagcgcgcggaagcccagtacttgcttgtttccaatggccacctccccaaagcatgtgacgccagtcccgagtccacgccactgacaggacagctccccgggaaacagagggtgccactgctgttggcaccaaaaagctaggttttgtctacctcagttcttgtcataccaatctctacgggaaagagaggtaggagaggctgcgaggaagcttgggttcaagcgtcactcatctgtacatagttgtaactcccatgtggagtatcagtcgctcacaggacttggatctgaagcacagtaaacgcaagaggggatttgtgtacaaaaggcaaaaaaagtatttgatatcattgtacataagagttttcagagatttcatatatatcttttacagaggctattttaatctttagtgcatggttaacagaaaaaaattatacaattttgacaatattatttttcgtatcaggttgctgtttaattttggagggggtggggaaatagttctggtgccttaacgcatggctggaatttatagaggctacaaccacatttgttcacaggagtttttggtgcgggtggggaaggatggaaggccttggatttatattgcacttcatagacccctaggctgctgtgcggtgggactccacatgcgccggaaggagcttcaggtgagcactgctcatgtgtggatgcccctgcaacaggcttccctgtctgtagagccaggggtgcaagtgccatccacacttgcagtgaatggcttttccttttaggtttaagtcctgtctgtctgtaaggcgtagaatctgtccgtctgtaaggcgtagaatgagggttgttaatccatcacaagcaaaaggtcagaacagttaaacactgcctttcctcctcctcttattttatgataaaagcaaatgtggccttctcagtatcattcgattgctatttgagacttttaaattaaggtaaaggctgctggtgttggtacctgtggatttttctatactgatgttttcgttttgccaatataatgagtattacattggccttgggggacagaaaggaggaagttctgacttttcagggctaccttatttctactaaggacccagagcaggcctgtccatgccattccttcgcacagatgaaactgagctgggactggaaaggacagcccttgacctgggttctgggtataatttgcacttttgagactggtagctaaccatcttatgagtgccaatgtgtcatttagtaaaacttaaatagaaacaaggtccttcaaatgttcctttggccaaaagctgaagggagttactgagaaaatagttaacaattactgtcaggtgtcatcactgttcaaaaggtaagcacatttagaattttgttcttgacagttaactgactaatcttacttccacaaaatatgtgaatttgctgcttctgagaggcaatgtgaaagagggagtattacttttatgtacaaagttatttatttatagaaattttggtacagtgtacattgaaaaccatgtaaaatattgaagtgtctaacaaatggcattgaagtgtctttaataaaggttcatttataaatgtcaaaaaaaaaaaaaaaaaa

SEQ ID NO: 90 - DNA, 1918 bp, Homo sapiens
gaggccccgccccctgagcctgggtagcggcgcgagggccgggagaaccgttcgcggaggaaaggcgaactagtgttgggatggccaccaactgggggagcctcttgcaggataaacagcagctagaggagctggcacggcaggccgtggaccgggccctggctgagggagtattgctgaggacctcacaggagcccacttcctcggaggtggtgagctatgccccattcacgctcttcccctcactggtccccagtgccctgctggagcaagcctatgctgtgcagatggacttcaacctgctagtggatgctgtcagccagaacgctgccttcctggagcaaactctttccagcaccatcaaacaggatgactttaccgctcgtctctttgacatccacaagcaagtcctaaaagagggcattgcccagactgtgttcctgggcctgaatcgctcagactacatgttccagcgcagcgcagatggctccccagccctgaaacagatcgaaatcaacaccatctctgccagctttgggggcctggcctcccggaccccagctgtgcaccgacatgttctcagtgtcctgagtaagaccaaagaagctggcaagatcctctctaataatcccagcaagggactggccctgggaattgccaaagcctgggagctctacggctcacccaatgctctggtgctactgattgctcaagagaaggaaagaaacatatttgaccagcgtgccatagagaatgagctactggccaggaacatccatgtgatccgacgaacatttgaagatatctctgaaaaggggtctctggaccaagaccgaaggctgtttgtggatggccaggaaattgctgtggtttacttccgggatggctacatgcctcgtcagtacagtctacagaattgggaagcacgtctactgctggagaggtcacatgctgccaagtgcccagacattgccacccagctggctgggactaagaaggtgcagcaggagctaagcaggccgggcatgctggagatgttgctccctggccagcctgaggctgtggcccgcctccgcgccacctttgctggcctctactcactggatgtgggtgaagaaggggaccaggccatcgccgaggcccttgctgcccctagccggtttgtgctaaagccccagagagagggtggaggtaacaacctatatggggaggaaatggtacaggccctgaaacagctgaaggacagtgaggagagggcctcctacatcctcatggagaagatcgaacctgagccttttgagaattgcctgctacggcctggcagccctgcccgagtggtccagtgcatttcagagctgggcatctttggggtctatgtcaggcaggaaaagacactcgtgatgaacaagcacgtggggcatctacttcgaaccaaagccatcgagcatgcagatggtggtgtggcagcgggagtggcagtcctggacaacccataccctgtgtgagggcacaaccaggccacgggaccttctatcctctgtatttgtcattcctctcctagccctcctgaggggtatcctcctaaagacctccaaagtttttatggaagggtaaatactggtaccttcccccagctttccatctgaggaccagaaaagttgtgtctcccttagatgagatctagacgcccccaaatccttgagatgtgggtatagctcagggtaagctgctctgaggtaaaggtccatgaaccctgccccactcctgtcagcccctcatcagccttttcagcaggttccagtgcctgacttgggataggactgagtggtaggaggagggggagtggaggggcatagcctttccctaattctgccttaaataaaactgcattgctgattcaaaaaaaaaaaaaaaaaaa

SEQ ID NO: 91 - DNA, 1268 bp, Homo sapiens
ggcattaatcaatccctgtttctattttaataggggggacaaggtaggggagagggaaaaacagttttggatataactatttggaaggagagtagacatgaagagggcaaaccctagcttttcattatctacaatcaatagtttgtttttcttttttaaaaaagaaagaaaaaccctttcaatcttcaatactctttaaaagcccacttcttagctactggccaatccacaccaattatttaaattcacttggtacacacctttgtccactgggtaaattatattcattatgcccactgctgcagcacgcataaaccaacacccctgcatggctgaacagggcctaatctaggactgatgggagaagggcttgcaaaccaagatcaaggtgtttctccgctaatactgtctaccaagctgatccctacaaaaatgcatataaaagcaggcaagtttagctactgtgttgcaagagaaaccaggaccttgttaaatagttctctccattaccatttattctctcaagggaagcttaaaaaaacaacaacaacaaaacaacacattggtctggccacctcatgaatccaacaagcattagtgtggcatttcagtggagaaggaaacttggggggaaaaatcccatcaaggttgtaagaaaggctcccaatttaactgtccctgtccctatttatccatcatccaagaccatccattattctagagcactctgatcaataaaaggggtccaagcatcaggagcaggcaaggagaaccaaaagacatcaagaaaccgatttgcttgagaaaagcagcgattcttcctttcagagttctccatggctgagaaaatgcccaagacatcatgtatgtgacttagatactgctttttgggaggttaagagtagcatgaagaacttaagatgatgataagagtctaaatttttagtttcaaggtttcaatagaatgtggatatattcaaaactttcaaaaaggacagtgtttagaaagggtaaaactaggacacagaaaacactgggaattaccacgacccccaagtgcttccggctccaggaaataaccattcatgtgtttgctggaggtcacacaattttcccctattacctggtgcaaaatgactcatcacttcccaaaagcttcttttcaaaccacgattttcccatttattttggtccaatgcagtcccattctttatggcctatagtctcactcccaactacccccctggggggttaaaaaaaaaaaaaaa

SEQ ID NO: 92 - DNA, 12515 bp, Homo sapiens
ctaccgggcggaggtgagcgcggcgccggctcctcctgcggcggactttgggtgcgacttgacgagcggtggttcgacaagtggccttgcgggccggatcgtcccagtggaagagttgtaaatttgcttctggccttcccctacggattatacctggccttcccctacggattatactcaacttactgtttagaaaatgtggcccacgagacgcctggttactatcaaaaggagcggggtcgacggtccccactttcccctgagcctcagcacctgcttgtttggaaggggtattgaatgtgacatccgtatccagcttcctgttgtgtcaaaacaacattgcaaaattgaaatccatgagcaggaggcaatattacataatttcagttccacaaatccaacacaagtaaatgggtctgttattgatgagcctgtacggctaaaacatggagatgtaataactattattgatcgttccttcaggtatgaaaatgaaagtcttcagaatggaaggaagtcaactgaatttccaagaaaaatacgtgaacaggagccagcacgtcgtgtctcaagatctagcttctcttctgaccctgatgagaaagctcaagattccaaggcctattcaaaaatcactgaaggaaaagtttcaggaaatcctcaggtacatatcaagaatgtcaaagaagacagtaccgcagatgactcaaaagacagtgttgctcagggaacaactaatgttcattcctcagaacatgctggacgtaatggcagaaatgcagctgatcccatttctggggattttaaagaaatttccagcgttaaattagtgagccgttatggagaattgaagtctgttcccactacacaatgtcttgacaatagcaaaaaaaatgaatctcccttttggaagctttatgagtcagtgaagaaagagttggatgtaaaatcacaaaaagaaaatgtcctacagtattgtagaaaatctggattacaaactgattacgcaacagagaaagaaagtgctgatggtttacagggggagacccaactgttggtctcgcgtaagtcaagaccaaaatctggtgggagcggccacgctgtggcagagcctgcttcacctgaacaagagcttgaccagaacaaggggaagggaagagacgtggagtctgttcagactcccagcaaggctgtgggcgccagctttcctctctatgagccggctaaaatgaagacccctgtacaatattcacagcaacaaaattctccacaaaaacataagaacaaagacctgtatactactggtagaagagaatctgtgaatctgggtaaaagtgaaggcttcaaggctggtgataaaactcttactcccaggaagctttcaactagaaatcgaacaccagctaaagttgaagatgcagctgactctgccactaagccagaaaatctctcttccaaaaccagaggaagtattcctacagatgtggaagttctgcctacggaaactgaaattcacaatgagccatttttaactctgtggctcactcaagttgagaggaagatccaaaaggattccctcagcaagcctgagaaattgggcactacagctggacagatgtgctctgggttacctggtcttagttcagttgatatcaacaactttggtgattccattaatgagagtgagggaatacctttgaaaagaaggcgtgtgtcctttggtgggcacctaagacctgaactatttgatgaaaacttgcctcctaatacgcctctcaaaaggggagaagccccaaccaaaagaaagtctctggtaatgcacactccacctgtcctgaagaaaatcatcaaggaacagcctcaaccatcaggaaaacaagagtcaggttcagaaatccatgtggaagtgaaggcacaaagcttggttataagccctccagctcctagtcctaggaaaactccagttgccagtgatcaacgccgtaggtcctgcaaaacagcccctgcttccagcagcaaatctcagacagaggttcctaagagaggaggagaaagagtggcaacctgccttcaaaagagagtgtctatcagccgaagtcaacatgatattttacagatgatatgttccaaaagaagaagtggtgcttcggaagcaaatctgattgttgcaaaatcatgggcagatgtagtaaaacttggtgcaaaacaaacacaaactaaagtcataaaacatggtcctcaaaggtcaatgaacaaaaggcaaagaagacctgctactccaaagaagcctgtgggcgaagttcacagtcaatttagtacaggccacgcaaactctccttgtaccataataatagggaaagctcatactgaaaaagtacatgtgcctgctcgaccctacagagtgctcaacaacttcatttccaaccaaaaaatggactttaaggaagatctttcaggaatagctgaaatgttcaagaccccagtgaaggagcaaccgcagttgacaagcacatgtcacatcgctatttcaaattcagagaatttgcttggaaaacagtttcaaggaactgattcaggagaagaacctctgctccccacctcagagagttttggaggaaatgtgttcttcagtgcacagaatgcagcaaaacagccatctgataaatgctctgcaagccctcccttaagacggcagtgtattagagaaaatggaaacgtagcaaaaacgcccaggaacacctacaaaatgacttctctggagacaaaaacttcagatactgagacagagccttcaaaaacagtatccactgtaaacaggtcaggaaggtctacagagttcaggaatatacagaagctacctgtggaaagtaagagtgaagaaacaaatacagaaattgttgagtgcatcctaaaaagaggtcagaaggcaacactactacaacaaaggagagaaggagagatgaaggaaatagaaagaccttttgagacatataaggaaaatattgaattaaaagaaaacgatgaaaagatgaaagcaatgaagagatcaagaacttgggggcagaaatgtgcaccaatgtctgacctgacagacctcaagagcttgcctgatacagaactcatgaaagacacggcacgtggccagaatctcctccaaacccaagatcatgccaaggcaccaaagagtgagaaaggcaaaatcactaaaatgccctgccagtcattacaaccagaaccaataaacaccccaacacacacaaaacaacagttgaaggcatccctggggaaagtaggtgtgaaagaagagctcctagcagtcggcaagttcacacggacgtcaggggagaccacgcacacgcacagagagccagcaggagatggcaagagcatcagaacgtttaaggagtctccaaagcagatcctggacccagcagcccgtgtaactggaatgaagaagtggccaagaacgcctaaggaagaggcccagtcactagaagacctggctggcttcaaagagctcttccagacaccaggtccctctgaggaatcaatgactgatgagaaaactaccaaaatagcctgcaaatctccaccaccagaatcagtggacactccaacaagcacaaagcaatggcctaagagaagtctcaggaaagcagatgtagaggaagaattcttagcactcaggaaactaacaccatcagcagggaaagccatgcttacgcccaaaccagcaggaggtgatgagaaagacattaaagcatttatgggaactccagtgcagaaactggacctggcaggaactttacctggcagcaaaagacagctacagactcctaaggaaaaggcccaggctctagaagacctggctggctttaaagagctcttccagactcctggtcacaccgaggaattagtggctgctggtaaaaccactaaaataccctgcgactctccacagtcagacccagtggacaccccaacaagcacaaagcaacgacccaagagaagtatcaggaaagcagatgtagagggagaactcttagcgtgcaggaatctaatgccatcagcaggcaaagccatgcacacgcctaaaccatcagtaggtgaagagaaagacatcatcatatttgtgggaactccagtgcagaaactggacctgacagagaacttaaccggcagcaagagacggccacaaactcctaaggaagaggcccaggctctggaagacctgactggctttaaagagctcttccagacccctggtcatactgaagaagcagtggctgctggcaaaactactaaaatgccctgcgaatcttctccaccagaatcagcagacaccccaacaagcacaagaaggcagcccaagacacctttggagaaaagggacgtacagaaggagctctcagccctgaagaagctcacacagacatcaggggaaaccacacacacagataaagtaccaggaggtgaggataaaagcatcaacgcgtttagggaaactgcaaaacagaaactggacccagcagcaagtgtaactggtagcaagaggcacccaaaaactaaggaaaaggcccaacccctagaagacctggctggctggaaagagctcttccagacaccagtatgcactgacaagcccacgactcacgagaaaactaccaaaatagcctgcagatcacaaccagacccagtggacacaccaacaagctccaagccacagtccaagagaagtctcaggaaagtggacgtagaagaagaattcttcgcactcaggaaacgaacaccatcagcaggcaaagccatgcacacacccaaaccagcagtaagtggtgagaaaaacatctacgcatttatgggaactccagtgcagaaactggacctgacagagaacttaactggcagcaagagacggctacaaactcctaaggaaaaggcccaggctctagaagacctggctggctttaaagagctcttccagacacgaggtcacactgaggaatcaatgactaacgataaaactgccaaagtagcctgcaaatcttcacaaccagacctagacaaaaacccagcaagctccaagcgacggctcaagacatccctggggaaagtgggcgtgaaagaagagctcctagcagttggcaagctcacacagacatcaggagagactacacacacacacacagagccaacaggagatggtaagagcatgaaagcatttatggagtctccaaagcagatcttagactcagcagcaagtctaactggcagcaagaggcagctgagaactcctaagggaaagtctgaagtccctgaagacctggccggcttcatcgagctcttccagacaccaagtcacactaaggaatcaatgactaatgaaaaaactaccaaagtatcctacagagcttcacagccagacctagtggacaccccaacaagctccaagccacagcccaagagaagtctcaggaaagcagacactgaagaagaatttttagcatttaggaaacaaacgccatcagcaggcaaagccatgcacacacccaaaccagcagtaggtgaagagaaagacatcaacacgtttttgggaactccagtgcagaaactggaccagccaggaaatttacctggcagcaatagacggctacaaactcgtaaggaaaaggcccaggctctagaagaactgactggcttcagagagcttttccagacaccatgcactgataaccccacagctgatgagaaaactaccaaaaaaatactctgcaaatctccgcaatcagacccagcggacaccccaacaaacacaaagcaacggcccaagagaagcctcaagaaagcagacgtagaggaagaatttttagcattcaggaaactaacaccatcagcaggcaaagccatgcacacgcctaaagcagcagtaggtgaagagaaagacatcaacacatttgtggggactccagtggagaaactggacctgctaggaaatttacctggcagcaagagacggccacaaactcctaaagaaaaggccaaggctctagaagatctggctggcttcaaagagctcttccagacaccaggtcacactgaggaatcaatgaccgatgacaaaatcacagaagtatcctgcaaatctccacaaccagacccagtcaaaaccccaacaagctccaagcaacgactcaagatatccttggggaaagtaggtgtgaaagaagaggtcctaccagtcggcaagctcacacagacgtcagggaagaccacacagacacacagagagacagcaggagatggaaagagcatcaaagcgtttaaggaatctgcaaagcagatgctggacccagcaaactatggaactgggatggagaggtggccaagaacacctaaggaagaggcccaatcactagaagacctggccggcttcaaagagctcttccagacaccagaccacactgaggaatcaacaactgatgacaaaactaccaaaatagcctgcaaatctccaccaccagaatcaatggacactccaacaagcacaaggaggcggcccaaaacacctttggggaaaagggatatagtggaagagctctcagccctgaagcagctcacacagaccacacacacagacaaagtaccaggagatgaggataaaggcatcaacgtgttcagggaaactgcaaaacagaaactggacccagcagcaagtgtaactggtagcaagaggcagccaagaactcctaagggaaaagcccaacccctagaagacttggctggcttgaaagagctcttccagacaccagtatgcactgacaagcccacgactcacgagaaaactaccaaaatagcctgcagatctccacaaccagacccagtgggtaccccaacaatcttcaagccacagtccaagagaagtctcaggaaagcagacgtagaggaagaatccttagcactcaggaaacgaacaccatcagtagggaaagctatggacacacccaaaccagcaggaggtgatgagaaagacatgaaagcatttatgggaactccagtgcagaaattggacctgccaggaaatttacctggcagcaaaagatggccacaaactcctaaggaaaaggcccaggctctagaagacctggctggcttcaaagagctcttccagacaccaggcactgacaagcccacgactgatgagaaaactaccaaaatagcctgcaaatctccacaaccagacccagtggacaccccagcaagcacaaagcaacggcccaagagaaacctcaggaaagcagacgtagaggaagaatttttagcactcaggaaacgaacaccatcagcaggcaaagccatggacaccccaaaaccagcagtaagtgatgagaaaaatatcaacacatttgtggaaactccagtgcagaaactggacctgctaggaaatttacctggcagcaagagacagccacagactcctaaggaaaaggctgaggctctagaggacctggttggcttcaaagaactcttccagacaccaggtcacactgaggaatcaatgactgatgacaaaatcacagaagtatcctgtaaatctccacagccagagtcattcaaaacctcaagaagctccaagcaaaggctcaagatacccctggtgaaagtggacatgaaagaagagcccctagcagtcagcaagctcacacggacatcaggggagactacgcaaacacacacagagccaacaggagatagtaagagcatcaaagcgtttaaggagtctccaaagcagatcctggacccagcagcaagtgtaactggtagcaggaggcagctgagaactcgtaaggaaaaggcccgtgctctagaagacctggttgacttcaaagagctcttctcagcaccaggtcacactgaagagtcaatgactattgacaaaaacacaaaaattccctgcaaatctcccccaccagaactaacagacactgccacgagcacaaagagatgccccaagacacgtcccaggaaagaagtaaaagaggagctctcagcagttgagaggctcacgcaaacatcagggcaaagcacacacacacacaaagaaccagcaagcggtgatgagggcatcaaagtattgaagcaacgtgcaaagaagaaaccaaacccagtagaagaggaacccagcaggagaaggccaagagcacctaaggaaaaggcccaacccctggaagacctggccggcttcacagagctctctgaaacatcaggtcacactcaggaatcactgactgctggcaaagccactaaaataccctgcgaatctcccccactagaagtggtagacaccacagcaagcacaaagaggcatctcaggacacgtgtgcagaaggtacaagtaaaagaagagccttcagcagtcaagttcacacaaacatcaggggaaaccacggatgcagacaaagaaccagcaggtgaagataaaggcatcaaagcattgaaggaatctgcaaaacagacaccggctccagcagcaagtgtaactggcagcaggagacggccaagagcacccagggaaagtgcccaagccatagaagacctagctggcttcaaagacccagcagcaggtcacactgaagaatcaatgactgatgacaaaaccactaaaataccctgcaaatcatcaccagaactagaagacaccgcaacaagctcaaagagacggcccaggacacgtgcccagaaagtagaagtgaaggaggagctgttagcagttggcaagctcacacaaacctcaggggagaccacgcacaccgacaaagagccggtaggtgagggcaaaggcacgaaagcatttaagcaacctgcaaagcggaacgtggacgcagaagatgtaattggcagcaggagacagccaagagcacctaaggaaaaggcccaacccctggaagacctggccagcttccaagagctctctcaaacaccaggccacactgaggaactggcaaatggtgctgctgatagctttacaagcgctccaaagcaaacacctgacagtggaaaacctctaaaaatatccagaagagttcttcgggcccctaaagtagaacccgtgggagacgtggtaagcaccagagaccctgtaaaatcacaaagcaaaagcaacacttccctgcccccactgcccttcaagaggggaggtggcaaagatggaagcgtcacgggaaccaagaggctgcgctgcatgccagcaccagaggaaattgtggaggagctgccagccagcaagaagcagagggttgctcccagggcaagaggcaaatcatccgaacccgtggtcatcatgaagagaagtttgaggacttctgcaaaaagaattgaacctgcggaagagctgaacagcaacgacatgaaaaccaacaaagaggaacacaaattacaagactcggtccctgaaaataagggaatatccctgcgctccagacgccaagataagactgaggcagaacagcaaataactgaggtctttgtattagcagaaagaatagaaataaacagaaatgaaaagaagcccatgaagacctccccagagatggacattcagaatccagatgatggagcccggaaacccatacctagagacaaagtcactgagaacaaaaggtgcttgaggtctgctagacagaatgagagctcccagcctaaggtggcagaggagagcggagggcagaagagtgcgaaggttctcatgcagaatcagaaagggaaaggagaagcaggaaattcagactccatgtgcctgagatcaagaaagacaaaaagccagcctgcagcaagcactttggagagcaaatctgtgcagagagtaacgcggagtgtcaagaggtgtgcagaaaatccaaagaaggctgaggacaatgtgtgtgtcaagaaaataacaaccagaagtcatagggacagtgaagatatttgacagaaaaatcgaactgggaaaaatataataaagttagttttgtgataagttctagtgcagtttttgtcataaattacaagtgaattctgtaagtaaggctgtcagtctgcttaagggaagaaaactttggatttgctgggtctgaatcggcttcataaactccactgggagcactgctgggctcctggactgagaatagttgaacaccgggggctttgtgaaggagtctgggccaaggtttgccctcagctttgcagaatgaagccttgaggtctgtcaccacccacagccaccctacagcagccttaactgtgacacttgccacactgtgtcgtcgtttgtttgcctatgttctccagggcacggtggcaggaacaactatcctcgtctgtcccaacactgagcaggcactcggtaaacacgaatgaatggataagcgcacggatgaatggagcttacaagatctgtctttccaatggccgggggcatttggtccccaaattaaggctattggacatctgcacaggacagtcctatttttgatgtcctttcctttctgaaaataaagttttgtgctttggagaatgactcgtgagcacatctttagggaccaagagtgactttctgtaaggagtgactcgtggcttgccttggtctcttgggaatacttttctaactagggttgctctcacctgagacattctccacccgcggaatctcagggtcccaggctgtgggccatcacgacctcaaactggctcctaatctccagctttcctgtcattgaaagcttcggaagtttactggctctgctcccgcctgttttctttctgactctatctggcagcccgatgccacccagtacaggaagtgacaccagtactctgtaaagcatcatcatccttggagagactgagcactcagcaccttcagccacgatttcaggatcgcttccttgtgagccgctgcctccgaaatctcctttgaagcccagacatctttctccagcttcagacttgtagatataactcgttcatcttcatttactttccactttgccccctgtcctctctgtgttccccaaatcagagaatagcccgccatcccccagatcacctgtctggattcctccccattcacccaccttgccaggtgcaggtgaggatggtgcaccagacagggtagctgtcccccaaaatgtgccctgtgcgggcagtgccctgtctccacgtttgtttccccagtgtctggcggggagccaggtgacatcataaatacttgctgaatgaatgcagaaatcagcggtactgacttgtactatattggctgccatgatagggttctcacagcgtcatccatgatcgtaagggagaatgacattctgcttgagggagggaatagaaaggggcagggaggggacatctgagggcttcacagggctgcaaagggtacagggattgcaccagggcagaacaggggagggtgttcaaggaagagtggctcttagcagaggcactttggaaggtgtgaggcataaatgcttccttctacgtaggccaacctcaaaactttcagtaggaatgttgctatgatcaagttgttctaacactttagacttagtagtaattatgaacctcacatagaaaaatttcatccagccatatgcctgtggagtggaatattctgtttagtagaaaaatcctttagagttcagctctaaccagaaatcttgctgaagtatgtcagcaccttttctcaccctggtaagtacagtatttcaagagcacgctaagggtggttttcattttacagggctgttgatgatgggttaaaaatgttcatttaagggctacccccgtgtttaatagatgaacaccacttctacacaaccctccttggtactgggggagggagagatctgacaaatactgcccattcccctaggctgactggatttgagaacaaatacccacccatttccaccatggtatggtaacttctctgagcttcagtttccaagtgaatttccatgtaataggacattcccattaaatacaagctgtttttactttttcgcctcccagggcctgtgcgatctggtcccccagcctctcttgggctttcttacactaactctgtacctaccatctcctgcctcccttaggcaggcacctccaaccaccacacactccctgctgttttccctgcctggaactttcccaccagccccaccaagatcatttcatccagtcctgagctcagcttaagggaggcttcttgcctgtgggttccctcacccccatgcctgtcctccaggctggggcaggttcttagtttgcctggaattgttctgtacctctttgtagcacgtagtgttgtgaaactaagccactaattgagtttctggctcccctcctggggttgtaagttttgttcattcatgagggccgactgtatttcctggttactgtatcccagtgaccagccacaggagatgtccaataaagtatgtgatgaaatggtcttaaaaaaaaaaaaaaaaaaaaaa

SEQ ID NO: 93 - DNA, 963 bp, Homo sapiens
gacacgaagcctcccgggtggcttacagacgctgccagcatcgccgccgccagaggagaaatgtctgaagtaagacccctctccagagacatcttgatggagaccctcctgtatgagcagctcctggaacccccgaccatggaggttcttggcatgactgactctgaagaggacctggaccctatggaggacttcgattctttggaatgcatggagggcagtgacgcattggccctgcggctggcctgcatcggggacgagatggacgtgagcctcagggccccgcgcctggcccagctctccgaggtggccatgcacagcctgggtctggctttcatctacgaccagactgaggacatcagggatgttcttagaagtttcatggacggtttcaccacacttaaggagaacataatgaggttctggagatccccgaaccccgggtcctgggtgtcctgcgaacaggtgctgctggcgctgctgctgctgctggcgctgctgctgccgctgctcagcgggggcctgcacctgctgctcaagtgaggccccggcggctcagggcggggctggccccacccccatgaccactgccctggaggtggcggcctgctgctgttatctttttaactgttttctcatgatgcctttttatatttaaaccccgagatagtgctggaacactgctgaggttttatactcaggttttttgttttttttttattccagttttcgttttttctaaaagatgaattcctatggctctgcaattgtcaccggttaactgtggcctgtgcccaggaagagccattcactcctgcccctgcccacacggcaggtagcagggggagtgctggtcacacccctgtgtgatatgtgatgccctcggcaaagaatctactggaatagattccgaggagcaggagtgctcaataaaatgttggtttccagcaaaaaaaaaaaaaa

SEQ ID NO: 94 - DNA, 848 bp, Homo sapiens
  misc_feature (671)..(671): n = a, t, g, or c
  misc_feature (677)..(677): n = a, t, g, or c
  misc_feature (737)..(737): n = a, t, g, or c
taaaaagtatttattttttactagtgaggatggaactaggggaagaagtttacagaaaagatgtccatatacaaagaaagaaatagcaaaatatttttggtcataatttagaaagaaactaatctataaaatggagacaattctccccaattcatctctctcatagaagagcataagcacgggctctcagttccttgatatcctcaagaggccacggatacgtctgacaagagcctgtatgaaactatatcgagatcgaacttttgaatataatccttcaatgtccagaagtttcttttgtagtgattctccaaaagcgttgattgcatcagcctgaagctggtctaaatcatgttggctcactatagccagcccacttctaaaatctagattggtttctgaggcgaaggaatcttgcagtcttctgcttttaaacaaggttctcgaggcaaataaggaatcttgagaatccgtgggcatgcaatgtaacaagtagtactccagatggcgccaaagaataaataggcaggtctctatgataaaagaacaaagggaaagcagtttagctcgattggtgatcaccttcaccaagcgccgtcttgctagaacatatttctgagcagtggagaatttatcacaccagcaggcatcacagactgacacaactcttntatctncatctggggaagctgctctacattttgtagcttgctgacactctgtcgatgactgtcatnatagctggagaaatcatagcactctgtttcagcaggagatgattatgctaaaccaggcaggcgccagtatggaacactggaagctgggtatcttgcgcggtcatctctatt

SEQ ID NO: 95 - DNA, 749 bp, Homo sapiens
ttttttttttttttttttttttttttttttttttttttccagatgaaattccaggcttttatcaaaagcaaaagtttatccctatccaaaaatgaaattatacaaattcatacatatggtaaagattctagctgcctcttaaacgagacaaattttcagcagaggggcccaaaacaaaatggtcctagccctctgaagtaaaaatatttatgggaaaaatcagtttttgtaagaaagaaaaattaagaatagtctctctcccaggccatagagcttcctttgtccaatcaggttggatcatgccaggggagatcagcttgctcaaaagtcactatttaacgaagaaaaacataaatcctttcagagaagggacactcagaaagaacaggtgaggagtgtgtaacatcaaaccaaaccaacctcatttcaaccccactcagggcctctctgatgcaatcccaaagttagcagtggcaatgcaactttcagaccgggagagctctgactgcctgttggatactcgagtcacagtccatggggtgttttgttattggccaatgtctgttaaccattaactctcttcatgattgcaccagttagaccatttgccctgatggggggaaaaagaagaagaaaaaacaaattagaagaaaaaaagtgacaagagaaagcaagctgctaatggccgatcccaacacactttctgggagacagtagatgaaatcacagccacagtgaccacatgctgc

SEQ ID NO: 96 - DNA, 1865 bp, Homo sapiens
gcgtggaggtcgacgactccgtcgcagactacggacctgtctgggtctcagccgccaaagaccccgtccggtaggtgagtggctcactttgagggcaagccttctcggatcgaggcttcttcatggccgctcagatcgtgagcggccggggctgctctctttgcggaggatggcgtctaatgagcgcagttgattcgaggaagtactagccggacatcatgagtggctgtcgggtattcatcgggagactaaatccagcggccagggagaaggacgtggaaagattcttcaagggatatggacggataagagatattgatctgaaaagaggctttggttttgtggaatttgaggatccaagggatgcagatgatgctgtgtatgagcttgatggaaaagaactctgtagtgaaagggttactattgaacatgctagggctcggtcacgaggtggaagaggtagaggacgatactctgaccgttttagtagtcgcagacctcgaaatgatagacggtatgtgaagggtggatggctgcattgaacaattattgtaggggtagcatttaagattcaggagtcattagcagtgatgattttgggacctgccgtataatctgttcttctattcccacgttagccaattgttcttgatgaatctatatgagtcatagaacacaaatctattgacggaagtcattagaatggcttgtgatatctgatggcttgaacttgcccacagttgaacacaagtgctgtcattgcatttcttccattgtgaatacgaattttcttcctcagaaatgctccacctgtaagaacagaaaatcgtcttatagttgagaatttatcctcaagagtcagctggcaggatctcaaagatttcatgagacaagctggggaagtaacgtttgcggatgcacaccgacctaaattaaatgaaggggtggttgagtttgcctcttatggtgacttaaagaatgctattgaaaaactttctggaaaggaaataaatgggagaaaaataaaattaattgaaggcagcaaaaggcacaggtcaagaagcaggtctcgatcccggaccagaagttcctctaggtctcgtagccgatcccgttcccgtagtcgcaaatcttacagccggtcaagaagcaggagcaggagccggagccggagcaagtcccgttctgttagtaggtctcccgtgcctgagaagagccagaaacgtggttcttcaagtagatctaagtctccagcatctgtggatcgccagaggtcccggtcccgatcaaggtccagatcagttgacagtggcaattaaactgtaaataacttgccctgggggcctttttttttaaaaaacaaaaaccacaaaaattcccaaaccatacttgctaaaaattctggtaagtatgtgcttttctgtgggggtgggatttggaaggggggttgggttgggctggatatctttgtagatgtggaccaccaaggggttgttgaaaactaattgtattaaatgtcttttgataagccttctgctcacatttttgtgaatgtctgaagtatatagtttgtgtatattgacagagctcttttataactaaagcaaatttaatttttttgtactagaaaaaaatttgaacattttagttcttggttataaaaatgttaattcagaattagtttaatgccttaattaaactaattaatagctttggacacttaaaagagctctaaatttgcttgtacataaaggcttaatttgttttccttgttagggtcaagggtgtcctccactctttaacagctgctggacagacacattagagcagctgtttgttattgataataaaatattataaaacta

SEQ ID NO: 97 - DNA, 898 bp, Homo sapiens
tcctctttccctaagcagcctgagggttgactggattggtgaggcccgtgtggctacttctgtggaagcagtgctgtagttactggaagataaaagggaaagcaagcccttggtgggggaaagtatggctgcgatgatggcatttcttaggacacctttggattaataatgaaaacaactactctctgagcagctgttcgaatcatctgatatttatactgaatgagttactgtaagtacgtattgacagaattacactgtactttcctctaggtgatctgtgaaaatggttcgctattcacttgacccggagaaccccacgaaatcatgcaaatcaagaggttccaatcttcgtgttcactttaagaacactcgtgaaactgctcaggccatcaagggtatgcatatacgaaaagccacgaagtatctgaaagatgtcactttacagaaacagtgtgtaccattccgacgttacaatggtggagttggcaggtgtgcgcaggccaagcaatggggctggacacaaggtcggtggcccaaaaagagtgctgaatttttgctgcacatgcttaaaaacgcagagagtaatgctgaacttaagggtttagatgtagattctctggtcattgagcatatccaagtgaacaaagcacctaagatgcgccgccggacctacagagctcatggtcggattaacccatacatgagctctccctgccacattgagatgatccttacggaaaaggaacagattgttcctaaaccagaagaggaggttgcccagaagaaaaagatatcccagaagaaactgaagaaacaaaaacttatggcacgggagtaaattcagcattaaaataaatgtaattaaaaggaaaaaaaaaaaaaaaaaaaaaaaaaa

SEQ ID NO: 98 - DNA, 592 bp, Homo sapiens
ttcggcacagggccggagagcaagagcggggaggaggagaggtcggaatgtctccaggagcccttagagaccgagtcccggcggcgacggcggggcagcgcaccggcaggcggattcattccacttaaaacctgaaaacattggaccacacaaagtcttactgatttcaggtaaaaacaataattgaagatgtccagcaaaacagcaagcaccaacaatatagcccaggcaaggagaactgtgcagcagttaagattagaagcctccattgaaagaataaaggtttcgaaggcatcagcggacctcatgtcctactgtgaggaacatgccaggagtgaccctttgctgataggaataccaacttcagaaaaccctttcaaggataaaaaaacttgcatcatcttatagtggaatagagaaacagctcctcgcctcttcccaacaacgcaaatttatgagcagctccttgaagaagatttaccttcagcttattttggtaaccactgctaataactaaaatgttctcagcttggaataatggactctgagtctctattttccaagttgtcctttctccttaaaataccctttt

SEQ ID NO: 99 - DNA, 3275 bp, Homo sapiens
gtactaccttcggtctaggcagcggaggcagccgcgaccccaggaaaccgaggaaatgaagacgcgaaggactacccgccttcagcagcagcactcagagcagcctccgctacagccgtctcctgttacgaccaggagagggctgcgggactctcattcctctgaagaggatgaagcatcttcccaaactgatttaagccaaacgatctcaaagaaaactgtcaggagcatacaagaggctccagtgagtgaagatcttgtaatcaggttacgtcgaccccctctaagatgcccaagatatgaagccaccagtgtccaacagaaggtcaatttctctgaagaaggagaaactgaagaagatgatcaagacagctctcacagcagtgtcactactgttaaggccagatccagggattctgatgaatctggagataaaaccaccagatcatctagtcaatatatagaatcattttggcagtcatcacaaagtcaaaacttcacagctcatgataagcaacgttcagtgctaagctcaggatatcaaaaaactccccaggaatgggccccacaaactgcaagaataaggaccaggatgcaaaatgacagcattctgaaatcagagcttggaaaccagtcaccatcaacctccagccgacaagtgactggacaaccccaaaatgcatcttttgtcaagaggaaccggtggtggctacttcctctgatagctgctcttgcctctgggagtttttggttctttagtactcctgaggtagaaaccactgctgttcaagagttccagaaccagatgaatcaacttaagaataagtaccaaggtcaagatgagaagctgtggaaaaggagccaaacattcctggaaaaacatcttaatagctcccatcctcggtctcagcctgctatcttactgctcactgctgcccgagatgctgaagaagcacttaggtgtctgagtgaacaaattgctgatgcctattcttcttttcgtagtgtccgtgccatccggattgatgggacagataaagctactcaagacagtgatactgtcaaactagaggtagaccaagaactgagcaatggatttaagaatggccagaatgcagctgtggtacaccgctttgagtcatttcccgcaggctctactttgatcttctacaaatattgtgaccatgaaaacgcagccttcaaagatgtagccttagtcctgactgtcttattggaggaagagacacttggaacaagtctaggcctaaaggaagttgaagaaaaagtaagagattttcttaaagtcaagttcaccaattctaacacacccaactcctacaatcatatggacccagacaaactgaatggcctctggagccgtatttctcacttagttctgcctgtgcaacctgaaaatgccctgaaaaggggcatctgcttataagaagtgagagagaagaaaaatcatgtcccaagttctgagaattgttcacactttctaaccagagacagaattcagagctctttttgaaagaactagtttctttttaaagaagttaagtgcttacataaacatggaacatataaatcattcattcaacctaattatctgtgatatgagagaatcatttcagtttccattgagagctctgttaaaggtatcttaggagtgcagattatatgcagttccttagagaatctgttttgattctgggctgagttattacaattatggtatgaccagtgagagcgatttgtgtcctttcttatgaaccttcctgattttttaacttagatttctcactaagtttcctgagttattagtaagattgctccctaaatgtaaccagggatttttccattatgttcccttttataccatttaggtgtgagttccttagcttctgcctataggaacataagtaatgaaaggtcatctaggtgtgtgtttggaatttttttcttttgttttttggaaaatggaaagaacaaggcaaggaaggaaaattaatggggaagctgaagggaggaaatgttacagtaatccactgagatgtagtttagtcaaacataggtatatgaactgttaatcttggtggattccgttgggatttgttttttacatctcctttttccttccttgaagaaaaattcttggctgtcccaaggattcttcatgtatattgcaaaatttaatatatttgttcacttgagtcttaagagtaggtcaggccaaggcaggtggatcacctgaggtcagaagttcaagaccagcctggccaacatggtgaaaccccctctctactaaaaatacaaaaattagctgggcgtggtggtgcatgcctgaaatcccagctacttgggaggctgaggcaggagaattgcttgaacccgggaggcggaggttgcagtaagccgagaccatgcttattgccctccagtctgggcaacaaaaatgaaactccgtctcaaaaaaaaaaaagtaggtcaattcgtaacagtttattttggacacaccctgaagcttttgttttgaattaagaaatgagtttcaggaattgacaaaccatttgttaaccagctgtcctgggctattgaagaagatttcattttccgcgcatccacttgttgcagtccaagtcctctagtgcaacgccatagcaaatataaagatttactatgcacgtgatacattttatggagtgcctcaagccaagatagtgaatttatatgaagggtgtgaaatgtatttctttactactatagtagtttagttataactttgcatctataattgagctttctcatctgtcaaatgctatggttttcttaaaatgttacaattctagatctatccaccttgtttttttattgtctacaaaccattaaatgtaaatattgtttttagagtcagtcattggctttgtcatttaccctttgagagttccacaagtggtagtagagtggtttaacgtctttcctctagtactaccagtattcataaatgtataccccttactgtaatttgttcctcttagaagtcagatcatctgatttatagaggattatgaaaaccagagtttttgaaaaggcttattttatacatacgtattatatagagaaacaaatgtttttattaaatgtttcattgacccaagtaatttaaaagtaatatgttacctatgtctttcaggaaaaataattatagcagctgatctgtaaatgactttaaaagctattttagtaatttaaataaatttactttcttggtttat

SEQ ID NO: 100 - DNA, 2399 bp, Homo sapiens
ttagaagaattgcataaaacgtagtaaatggggtctgtcattagcaaaggcaaatctaagcaatcatttttccccccagaagttacttagaaggagaactgggaacacttggggtctctctaactgatggcattcacttcacacagtcgtctatgttatccagagatttttatttcattttacattttagggcacagttctttggggctaattaaaatggggtttgcaggctttttatggtgaagaataatatatctctgtctatagctttcccatggtagcctgataaggctgagagagaaaaatatgtgcagtatctcatcctccccctgtaccaggccatagctttgaagtgtattttgtaaattcaactataggttagtcagaatgctgtttttcgttaattaacttagcctgtgttgatatctcctccttcctggtcacattcaaaccttcccagagtacaaaggggtatgtagaaaggattccagaagaagtaatactttattctctaatgttaatagcttttctggatctcttagtagggggaaagtagaaaatgattgtttaacagtatgtgtggtgatgtcattatctccagagaggcttcaagaaatcctttggaaataaaaagttaaatgtttgcatttcatgtggtatttcaggtcttcaggttctgattagcttacttttttcctttgtctttggctgatttctgctttgtagataaataataatagccctgagatgtttctaacatttaaataagaaaaaaatcaaatcgaagtcagcctgctggaaaagtgatcacatggcagttgcagtaacttgtatggaaagagaaaatgcaatgagcccagttactgcacttgccactaccatgctgtccatggaaggaataatcagcagttcagttgtcacaagccgcccttgaagaaaacgcagcaaaatattttaaaatgaagatattgcagtccccagagccagtgaaggtttcttttggtaaaatgaaattgtgccattgtcaaagtaccccgtagtgatgagcactgactggttcactggccacattttagttcttcataataataggccacaaaagggctctgtggtttgcctccatgtgcactggcccctccccacccctagggggcactcagtagctgctgagaaggcctgtccacgaggctgttggaacccctccaataaatacttagaggtagtgtatctgatgcttgttttcgtggagaaaattgtattggagaacttaaaacatcacgaatatttttaataggatccgcagacacccaaaggagaagcttggtcttttccaggtatttccaacttgagttcaacccaaagcctttgaaaggaatgcattaccccatgaccacatgctgagaccccatggggtctaacacgggacctaagaaagtctctgcagccagatagtacatggtgtctccacaaaactaggcattctggagattgcccagaaagggatgtgaggggaccgttaagatctgtcttgcttatctcatgcactcacattccttcagcctcctggagttcctgataaaaggaagccagggtgtggacattttttagctattgatttcccaatagcttgtggatcagttgtacacccacacttccttctctgcctaattccgtttttctggaaaaagtagtatgcccatgtatgtgtgtttttcttaacacaggtccatgaaagtttggcttcctggtttgatgtctgttgcgtggcctggaaaccagggagcagcaactattgagatggtttctgtgttcagtgaaaaattctatttcattgagacaattttttctttatccacagtaattttttgacactgtcatcatgaaactacccttaggaaaataagattacctgcaaaaaaaaaaaagaaatgagttatggaataggaacagttatgtgatgattctgaaactttaacttagagcttcattactttaagaatggaaaacaacctctgagtttgatttcccaaagtttcataaagcccctaagctcatgattttcatcaactctttgcccacatagtcatttacctccacagccgtttgttgtcatagaaggggtggtggtgtttggatttgatttttttcaacttgcagtgagaaataggataggtgacaaaaccttacttgttttcttaagacaattcagtgcttgagcatctctgtcagaaatggaatgaaatactgttagccaattagaattattttatgtattgttattgtgttttgctgatttttatatgaaaatataattattcattcttgatctctggaagcaatcattattatgaggatcattttactttggaaacactttcataataaagataagtattaag

SEQ ID NO: 101 - DNA, 6496 bp, Homo sapiens
cgcactctccgtccccgcggctggcgcaggacctcactcgagcggagcgcccacggggagcgggtcgcggggcggcggcggcgaggaggaggcgagaaggagttggaggaggaggaggaggaggcgagggcgagcgagcccagcggggtcccggccgccccgcgggccaaagtcgagccctcccgcccgtgggcgagcgcgccagccgccccttccagaacagccgccgccacaaagaagaacggggggtgccgaggtccccatgacctcctaaagtggtgcggtccctgctgagtgcgctgcccgggccgtgacccgcgcccctgtgcgtccccgcgcgcctccgagcgcccctgtgcgccccggcccgcgccccgccggcatggacgtccatacccgctggaaagcgcgcagcgcgctccgcccgggcgccccgctgctgcccccgctgctgctgctgctgctgtgggcgccgcctccgagccgcgcagctcagccagcagatctcctgaaggttctagattttcacaacttgcctgatggaataacaaagacaacaggcttttgcgccacgcggcgatcttccaaaggcccggatgtcgcttacagagtcaccaaagacgcgcagctcagcgcacccaccaagcagctgtaccctgcgtctgcatttcccgaggacttctccatcctaacaactgtgaaagccaagaaaggcagccaggccttcctggtctccatctacaacgagcagggtatccagcagattgggctggagctgggccgctctcccgtcttcctctacgaggaccacacggggaagcctggcccggaagactaccccctcttccggggcatcaacctgtcagatggcaagtggcacagaattgctctcagcgtccacaagaaaaatgtcaccttgatcctcgactgtaaaaagaagaccaccaaattcctcgaccgcagcgaccaccccatgatcgacatcaatggcatcatcgtgtttggcacccggatcctggatgaggaggtgtttgagggtgacatccagcagctgctctttgtctcggaccaccgggcagcttatgattactgtgagcactacagccctgactgtgacaccgcagtacctgacaccccacagtcgcaggaccccaatccagatgaatattacacggaaggagacggcgagggtgagacctattactacgaatacccctactacgaagaccccgaagacctagggaaggagcccacccccagcaagaagcccgtggaagctgccaaagaaaccacagaggtccccgaggagctgaccccgacccccacggaagctgctcccatgcctgaaaccagtgaaggggctgggaaggaagaggacgtcggcatcggggactatgactacgtgcccagtgaggactactacacgccctcaccgtatgatgacctcacctatggcgagggggaggagaaccctgaccagcccacagacccaggcgctggggccgaaattcccaccagcaccgccgacacctccaactcctccaatccagctccgcctccaggggaaggtgcggatgacttggagggggagttcactgaggaaacgatccggaaccttgacgagaactactacgacccctactacgaccccaccagctccccgtcggagatcgggccgggaatgccggcgaaccaggataccatctatgaagggattggaggacctcggggcgagaaaggccaaaagggagaaccagcgattatcgagccgggcatgctcatcgagggcccgcctggcccagaaggccccgcgggtcttcccggacctccaggaaccatgggtcccactggccaagtcggggaccctggagaaaggggcccccctggacgcccaggccttcctggggccgatggcctgcccggtcctccaggaaccatgctcatgctgcccttccggtttggaggtggcggcgatgcgggctccaaaggccccatggtctcagcccaggagtcccaggcgcaagccattctccagcaggccaggttggcactgaggggaccagctggcccgatgggtctcacagggagacctggccctgtgggtccccctgggagcggaggtttgaagggcgagccgggagacgtggggcctcagggtcctcgaggtgtgcaaggcccgcctggtccggccgggaagcccggaagacggggtcgggctgggagtgatggagccagaggaatgcctggacaaactggccccaagggtgaccggggtttcgacggcctggctgggttgccaggcgagaagggccacaggggtgaccctggtccttccggcccaccaggacctccgggagacgatggagaaaggggtgacgacggagaagttgggcccagggggctgcctggggagcccgggccacgtggtctgcttgggccgaaagggcccccaggtcctcccggacctcccggtgtcacgggtatggacggccagccggggccaaaaggaaatgtgggtccccagggagagcctggccccccaggacagcagggtaatccaggcgcccagggtcttccaggcccccagggtgcaattggtcctccaggagaaaagggtcccttggggaaaccaggccttccaggaatgcccggtgctgacggacccccgggacaccctggcaaagaaggccctccaggagagaaaggaggtcagggtccacctggcccccagggtccgattggctacccaggtcctcgaggagtcaagggggccgatggcatccgtggtctgaagggcacaaagggcgagaagggtgaagacggctttcctgggtttaaaggagacatgggcatcaagggtgatcggggggagatcggcccacccggtcccaggggagaagatggccctgaaggcccaaagggtcgcggaggtcccaatggtgaccccggtcctctgggaccccctggggagaagggaaaactcggagtcccagggttaccagggtatccaggaagacaaggaccaaagggctctattggattccctggatttcctggcgccaatggagagaagggcggcagggggacccctggaaagccaggaccgcgggggcagcgaggcccaacgggtccgaggggtgaaagaggcccccggggcatcactgggaagcctggccccaagggcaactccggaggtgacggcccagctggccctcctggtgaacggggacccaatggaccccaaggacccacaggatttcctggaccaaagggcccccctggccctccaggcaaggatggactcccaggacaccctggacagagaggcgagactggtttccaaggcaagaccggccctccaggcccccccggcgtggtcggccctcagggtcccacgggagaaacgggcccaatgggtgagcgtggccaccctgggccccctggaccccccggtgaacaggggcttccgggccttgctggaaaagaagggacgaagggtgacccaggccctgcaggcctccctgggaaagatggccctccaggattacgtggtttccctggggaccgagggcttcctggtccagtgggagctcttggactgaaaggcaatgaagggccccctggcccaccaggccctgcgggatctccaggggagagaggtccagctggagccgctgggcccatcggaattccagggagacctgggccccagggacccccagggccggcaggagagaaaggggctcctggcgagaaaggcccacaaggcccagctggccgagacggtctccaggggcctgtggggctcccgggtccagctggccctgtgggtccccctggagaagacggagataagggagagatcggggagccggggcagaaaggaagcaagggggacaaaggagaacagggtcctcctgggcctacaggtcctcaaggccccatcggacagccaggcccctctggagctgacggcgagccggggcctcggggccagcagggccttttcgggcagaaaggtgatgaaggtcccagaggctttcctggaccccctgggccagtggggctgcagggtttgccaggacctccaggcgagaagggtgagacaggagacgtgggccagatgggccccccgggtccccctggcccccgaggaccctccggagctccaggtgctgatggcccacaaggtcccccaggtggaataggaaaccctggtgcagtgggagagaagggcgagcctggcgaagcaggtgagcctggcccttccgggagaagcggccccccgggacccaaaggagaaaggggagagaagggcgagtcaggcccttcaggtgctgccggaccccctggacccaaaggccctcccggagatgatggtcccaaaggcagccctggcccagtgggttttcctggagatcctggcccccccggagagcctggccccgcgggtcaagatggtccccctggtgacaaaggagatgatggtgaacccgggcagacgggatcccccggccctactggtgaaccaggtccatcggggcctccaggaaaaaggggtcccccaggccccgcaggccccgaaggcagacagggagagaaaggggccaagggagaagccggcttggaaggccctcctgggaagactggccccatcggcccccagggggcccctgggaagcccggaccggatggccttcgagggatccctggccctgtgggagaacaaggtctcccaggatccccaggcccggacggtccccccggccccatgggtcccccaggacttcccggcctcaaaggagattctggtcccaaaggtgaaaagggtcatccaggcctgatcgggctcatcggtcctccgggtgaacagggtgagaagggcgaccgtggtctccctggcccccagggctcctccggtcctaagggagaacagggtatcactggtccttctggcccgattgggcctcctgggccccctggcctgccgggtccgcctggtccaaaaggtgctaagggctcctcgggtccaactggcccgaagggtgaggcaggccacccaggacccccaggccccccgggccccccgggagaggtcatccagcccctgccaatccaggcatccaggacgcggcggaacatcgacgccagccagctgctggacgacgggaatggcgagaactacgtggactacgcggacggcatggaagagatcttcggctctctcaactctctgaagctggagattgagcagatgaaacggcccctgggcacgcagcagaaccccgcccgcacctgcaaggacctgcagctctgccaccccgacttcccagatggtgaatactgggtcgatcctaaccaaggatgctccagggattccttcaaggtttactgcaacttcacagccggggggtcgacatgcgtcttccctgacaagaagtccgaaggggccagaatcacttcttggcccaaagaaaacccgggctcctggttcagtgaattcaagcgtgggaaactgctctcctatgtggacgccgagggcaaccctgtgggtgtggtacagatgaccttcctgcggctgctgagcgcctctgcccaccagaacgtcacctaccactgctaccagtcagtggcctggcaggacgcagccacgggcagctacgacaaggccctccgcttcctgggctccaacgacgaggagatgtcctatgacaacaacccctacatccgcgccctggtggacggctgtgctaccaagaaaggctaccagaagacggttctggagatcgacacccccaaagtggagcaggtgcccatcgtggacatcatgttcaatgacttcggtgaagcgtcacagaaatttggatttgaagtggggccggcttgcttcatgggctaggagccgccgagcccgggctcccgagccgaattcagcaacctcgtacctcagcatgccattgcttcgtgagtgtcccgtgcacgtcctgatcctggacagtgaaggcttctccctcccctcccacctgacttcatctacgcctcggcaccacggggtgtgggaccccagcccggagagaacagagggaaggagccgcgcccccacctggagctgaatcacatgacctagctgcaccccagcgcctgggcccgccccacgctctgtccacacccatgcgccccgggagcggggccatgcctccagccccccagctcgcccgacccatcctgttcgtgaataggtctcaggggttgggggagggactgccagatttggacactatatttttttctaaattcaacttgaagatgtgtatttcccctgaccttcaaaaaatgttccaaggtaagcctcgtaaaggtcatcccaccatcaccaaagcctccgtttttaacaacctccaacacgatccatttagaggccaaatgtcattctgcaggtgccttcccgatggattaaaggtgcttatgtttttgtgagttttaagtaaatatttgt

SEQ ID NO: 102 - DNA, 1216 bp, Homo sapiens
ttcggcacttgggagaagatgtttgaaaaaactgactctgctaatgagcctggactcagagctcaagtctgaactctacctccagacagaatgaagttcatctcgacatctctgcttctcatgctgctggtcagcagcctctctccagtccaaggtgttctggaggtctattacacaagcttgaggtgtagatgtgtccaagagagctcagtctttatccctagacgcttcattgatcgaattcaaatcttgccccgtgggaatggttgtccaagaaaagaaatcatagtctggaagaagaacaagtcaattgtgtgtgtggaccctcaagctgaatggatacaaagaatgatggaagtattgagaaaaagaagttcttcaactctaccagttccagtgtttaagagaaagattccctgatgctgatatttccactaagaacacctgcattcttcccttatccctgctctggattttagttttgtgcttagttaaatcttttccagggagaaagaacttccccatacaaataaggcatgaggactatgtgaaaaataaccttgcaggagctgatggggcaaactcaagcttcttcactcacagcaccctatatacacttggagtttgcattcttattcatcagggaggaaagtttctttgaaaatagttattcagttataagtaatacaggattattttgattatatacttgttgtttaatgtttaaaatttcttagaaaacaatggaatgagaatttaagcctcaaatttgaacatgtggcttgaattaagaagaaaattatggcatatattaaaagcaggcttctatgaaagactcaaaaagctgcctgggaggcagatggaacttgagcctgtcaagaggcaaaggaatccatgtagtagatatcctctgcttaaaaactcactacggaggagaattaagtcctacttttaaagaatttctttataaaatttactgtctaagattaatagcattcgaagatccccagacttcatagaatactcagggaaagcatttaaagggtgatgtacacatgtatcctttcacacatttgccttgacaaacttctttcactcacatctttttcactgactttttttgtgggggcggggccggggggactctggtatctaattctttaatgattcctataaatctaatgacattcaataaagttgagcaaacattttactt

SEQ ID NO: 103 - DNA, 1197 bp, Homo sapiens
acacatatctcagcaggttaagagaaacggggagggaagggcagctgcaaagttcccaggagtaaaggggcggtgggagtgtgctcgggcagcacaggggagggaagattaaggcacaggtgcgcggggcctcagacggcccaggggaggggtgtggaaacctcccctctcagatgcagctggtgagtggctggcgagggggcccacggcaaagacccctcttggcaactgtgagtcccctcatctcactgcgcagtggtaatggaggcgtctcaggcagggttcctcgtagagggtcgggggtctcacagccccatgggccccgatcacgggccgggcctcgggagcaggggtgctcagcaacgggggcaggcccggccggctggtgctcgcggggatgctgggtccgcgggggcgtggagccgggtcggctgggtgcgcgcatgctgcggagcttcgggctgggaaggccacgttggtgcagaagaggccgaggcagcagctggcgctggcactccttcccactgggccagagcgtcccccagcgagaggtagtatgcgcatccaagccgggcagtgactactctgtacaggcggggcaggacagcaggctacggacagggcagctacttggacgcgggagcagttccaatcctgatccgagtagcctggcacgggcgagtgccttgccaaggttcctcgtgtgcgcggcataaccaggtaatggcagatggtgcccgtctgctcccttcctccaaggggattgtcctccggaaccgtcgtgggcaatacaatccagcgaggcggatggatgaaggcaaaaagggacattaagggggagagatgatagggcgcactatgtgacgtggtccatgagcgcacagcacaccattcgatcaaggatgagacacggagggccaaggggcacaatcgaaggccaaaaagaggggaacaaacgaaggaccgggacagggccaggccccccgcacggacacatagcaagggagcgaggaggaggaacgcccgactaggagagcaccggggaggaggacaggacaagggcaaaagcgggtgcagcagaaagagacagggcgcgagcaagcaagaagcgagagagagaagaggcagaggaagaaaggcaggaacgcggagcggcaacaatgagcggggataacgaccgagcacacaaatcagtgg

SEQ ID NO: 104 - DNA, 707 bp, Homo sapiens
  misc_feature (513)..(513): n = a, t, g, or c
  misc_feature (553)..(553): n = a, t, g, or c
  misc_feature (562)..(562): n = a, t, g, or c
  misc_feature (631)..(631): n = a, t, g, or c
  misc_feature (670)..(670): n = a, t, g, or c
  misc_feature (679)..(679): n = a, t, g, or c
  misc_feature (696)..(696): n = a, t, g, or c
ttttactggaaggctgtatttatgctaaacctttattacttttagaaagctgtacacttttttaaaaaatttgcacttataaataatagaaaaaatattagaatcaaaatttcgtcattacagatgggaaaatatgtactataaggaattcaagttaacagaggcttgatttatataaaagaaagctgcagttttaaagttgtgttccttaaagaccagattatagcttatctgaatgggcttgacactttcaaatggaataaagttacaatattaaacagattagggtaagaaaatctaaatctggcacatctctattatttgacagtgtttaaccaaatacatcatacagaatagaaggtgagtgccaggcccctgaggaggagctctcgtgttccacagcaaagcgctgcccaaggactgcgggaagtgatccagctgccttcacacggaggacacgagactgcttcctcaagggctcctgcctgcctggacactggtgggaggcgctgnttagttggctggtttcagaggggtctttcggagggacctnctgctgcangctgaagtgtctttattcctggcgggagaccgcacattccactgctgaagctgtgggggcggttatcangcagtgataaaccatagatgtcatttccttgactccggncttcatttntctctttgctgacgacngagtcccgggg

SEQ ID NO: 105 - DNA, 1656 bp, Homo sapiens
atgcccacccctggggcagcctccctgttgtcggctgtgcaagcccaagaacgcagactttatgtacctctccctggaggcttctcggtgcctccagtgaccccgatgcctcactgccttctggaccccaaagaggatctaaagggctgtccacaggcttgctctggctgtagcatgggaacccctgctccttcttatctggtgcaaggagcccaggggatgcctttaaggaaggccgcatccttagcaactaagttggaagaaatggggctctttggccagcaatgtcttcccgccatgggctatacctgcaggtgccgggagccacttctgcttccatcccacctgattggagtgggcttcccacaggcccccgctccgcagctcctcagtgctctcctcctcctccctgctcccccgagcccagcccagtctgaggtccatccccctgtgaggggagctgagcagtgctgcaaactcagtgctcctgagtaccctggggatttgctgaactgcacattctcattctgtaaaccggagctgagcctctgcacgtctaacctgctccctggcaatgctgctgttactgagcagagtggaaaagtgctagacaatacattggggggaaatttcagtctcaaatgcattggagcagaaaccagaactccctgtcaagctgctctgtgggtttttgaagcgaaggtctccaggctcatgaaatctgcctcttgccaaaggcagaggatccactggcagcagggagcactggctgcagtcaggcagggagatttagggcttaaatacaaggaaatttcatgtaaggatgcaggagtgtttcatggaacctcaagctcaggaaagctgcacagccatgggaagaccctagagccggagtctggaaaagcaatccgagcttggatcttagaaatcttgtcttcttgcaaaccgggttctctggtccaaatggccaaaaacatgaccatggacagggcctgtgcttatctcgtcacctgcagagaggcaactctctggtggggagtagttgcaggtagtcttgtttatgaacatggcaatcagaagcccatccctgtcactgtgtggaggggaggggagagaagagggatggttccaaccaaaaaagatacatccacatctgttttgttcatccagatacacgtgctaacattttcagctgagaataaaattcagagcaactgtaactcttcctcttgcatcagaccaaccggcagaagggaacgggatgtcacaaaccagactcacgcatctggaaaacgttgtgtggctgggctggctccagaaggaagcgacgagggccttctaccggccacactcccttgcttgggcttccctaagctgctttctgcagaggaaagggccaatcacggccagccaaggaatacaaggccttgtcagctggaccttgactgcgctatattcggccacttccacacattgcctaacaagcttcttctggtcagtgtgtctgagatcctcacctcagaaattctcacattagcaaacctactccaaggatgccagcatgaacctgaacggtatggtcacgttacagatccagaacacaaaacgacttccgcttttacagtttcaaaggcctcaaggtggagaaaaaactga

SEQ ID NO: 106 - DNA, 566 bp, Homo sapiens
ttttgggatgcttcactttctttattgcccatccaggggacagccaagccagctccatctgcattctggctgcagcgtgtacattaggggactcaggggccacagtgtgggaccgtgcacactggcaaggcactggcggatgctggcaggccagtggacatggatagatgagaatgacaactcacagatgtcctagcttccgctggcccagctgccagccactggccatcacccttttgcccagcatgtgtgcattgtcacccaaaacatcttgaaacttgccattagtgaggcattcaacaaagaagtaagctaagtgagtaggaaacagtgtttcctggaatataccgcactctgcctgaaataggaaaactatgtttgccgggaagcagcagcagcaggaaagaagttataccaaaaacgacttgtacaccacagacattataaccctttcctcaaagaaacagtcatgttctgttgggtattatggacaggtctctggaaatttatctaataaagaccaacaaacttccccagcagtgcctctgagtaccgtgtgaattctg

SEQ ID NO: 107 - DNA, 3088 bp, Homo sapiens
ttgcttgagtcatcttctgaagctttaaaaacaattgatgaattggccttcaagatagacctaaatagcacatcacatgtgaatattacaactcggaacttggctctcagcgtatcatccctgttaccagggacaaatgcaatttcaaattttagcattggtcttccaagcaataatgaatcgtatttccagatggattttgagagtggacaagtggatccactggcatctgtaattttgcctccaaacttacttgagaatttaagtccagaagattctgtattagttagaagagcacagtttactttcttcaacaaaactggacttttccaggatgtaggaccccaaagaaaaactttagtgagttatgtgatggcgtgcagtattggaaacattactatccagaatctgaaggatcctgttcaaataaaaatcaaacatacaagaactcaggaagtgcatcatcccatctgtgccttctgggatctgaacaaaaacaaaagttttggaggatggaacacgtcaggatgtgttgcacacagagattcagatgcaagtgagacagtctgcctgtgtaaccacttcacacactttggagttctgatggaccttccaagaagtgcctcacagttagatgcaagaaacactaaagtcctcactttcatcagctatattgggtgtggaatatctgctattttttcagcagcaactctcctgacatatgttgcttttgagaaattgcgaagggattatccctccaaaatcttgatgaacctgagcacagccctgctgttcctgaatctcctcttcctcctagatggctggatcacctccttcaatgtggatggactttgcattgctgttgcagtcctgttgcatttcttccttctggcaacctttacctggatggggctagaagcaattcacatgtacattgctctagttaaagtatttaacacttacattcgccgatacattctaaaattctgcatcattggctggggtttgcctgccttagtggtgtcagttgttctagcgagcagaaacaacaatgaagtctatggaaaagaaagttatgggaaagaaaaaggtgatgaattctgttggattcaagatccagtcatattttatgtgacctgtgctgggtattttggagtcatgttttttctgaacattgccatgttcattgtggtaatggtgcagatctgtgggaggaatggcaagagaagcaaccggaccctgagagaagaagtgttaaggaacctgcgcagtgtggttagcttgacctttctgttgggcatgacatggggttttgcattctttgcctggggacccttaaatatccccttcatgtacctcttctccatcttcaattcattacaaggcttatttatattcatcttccactgtgctatgaaggagaatgttcagaaacagtggcggcggcatctctgctgtggtagatttcggttagcagataactcagattggagtaagacagctaccaatatcatcaagaaaagttctgataatctaggaaaatctttgtcttcaagctccattggttccaactcaacctatcttacatccaaatctaaatccagctctaccacctatttcaaaaggaatagccacacagataatgtctcctatgagcattccttcaacaaaagtggatcactcagacagtgcttccatggacaagtccttgtcaaaactggcccatgctgatggagatcaaacatcaatcatccctgtccatcaggtcattgataaggtcaagggttattgcaatgctcattcagacaacttctataaaaatattatcatgtcagacaccttcagccacagcacaaagttttaatgtctttaagaaaaagaaatcaatctgcagaaatgtgaagatttgcaagcagtgtaaactgcaactagtgatgtaaatgtgctattacctaggtaactgcatatatataaggaatgtattttgttaagaaggcttttgtgaaattcagaatttttctttttaatatatttcttccatggaagagttgtcatcactaaaacttcagtactgagagtaacatgactcagtagccacagaagctatgatttgtaaaatatataattgaatcagagtaatcataatgcaggggagacattcaaattagagacaagggagaagcaatgctgaggaagaccctagatagagctcattttactccacctaatcgttatatctggatatacccattttctgcatcttctttctcaacaataaactgtccttgctttggagactttaagacatttcctaaagcacaaataaaagcctcgtatttccccattgagagttttgttccaaggaatatgaagtgagacatatgggtgagtcataataatcaaaataatttatgaagagctgggtctgcaatagctagtctaaaaactacttgtgtgtcagtcctctggttatagtatataagagcctgaggaggtctggcaagatagatggtgtattatttatggatcaggctgctgcatacaaaccttgcatactattatgcagcttacctaactctcagactattctgagtaatgcttgcttgctaatgaatgtataggagaccacattgtaattgttcttagatgatggagtccatgcagtttcttagaaatcggtctcagtgcatgctgtgctttttcacatttgctctgggttatctgggaagtatcaggttctgggaggcaacagcattaagtgataagaaaaggagacattctggcaaagccaatctgcttaaaggcaaagtccagaacctggaacctagaggcctttctctctgcacgaaaaacaggtagtttgcagtctgagatatgggagagcttttaggctacacagcaacccaagggacctctcaccttttgctgagcttcaatcaggaagctatttgcctggctccagcagatgatgagataatgaggtagtgggttttttattactgttccattttgcaacatcctgcaacaccatcctgggagacaagagcattacccagcttggctttcacgggggagggttgtattcagt

SEQ ID NO: 108 - DNA, 1542 bp, Homo sapiens
cgaccggcacgttcaccccatccctcaggctttatttattttttttcgacaggttcttttcaaggctccagtcaccgcagcagttgtccatgctgtagtttccactttcctgtatgggcgggctggttaggattccactttcccccaagtgcttagcccagggccagacaaaaagtagttgcttaagaaatacttgttgaaggaataaattaatgaatgaatttgtgcttacagcggctggatggcagacaaacctatgattataggaacatcaggatctcatttggaacagattacggatgctgcattgtggaacttggaaaaacaagagttcttggacaggtttcctgtgaacttgtgtctccaaaactcaatcgggcaacagaaggtattctttttttaaccttgaactctctcagatggccgctccagctttcgaacctggcaggcagtcagatctcttggtgaagttgaatcgactcatggaaagatgtctaagaaattcgaagtgtatagacactgagtctctctgtgttgttgctggtgaaaaggtttggcaaatacgtgtagacctacatttattaaatcatgatggaaatattattgatgctgccagcattgctgcaatcgtggccttatgtcatttccgaagacctgatgtctctgtccaaggagatgaagtaacactgtatacacctgaagagcgtgatcctgtaccattaagtatccaccacatgcccatttgtgtcagttttgcctttttccagcaaggaacatatttattggtggatcccaatgaacgagaagaacgtgtgatggatggcttgctggtgattgccatgaacaaacatcgagagatttgtactatccagtccagtggtgggataatgctactaaaagatcaagttctgagatgcagtaaaatcgctggtgtgaaagtagcagaaattacagagctaatattgaaagctttggagaatgaccaaaaagtaaggaaagaaggtggaaagtttggttttgcagagtctatagcaaatcaaaggatcacagcatttaaaatggaaaaggcccctattgatacctcggatgtagaagaaaaagcagaagaaatcattgctgaagcagaacctccttcagaagttgtttctacacctgtgctatggactcctggaactgcccaaattggagagggagtagaaaactcctggggtgatcttgaagactctgagaaggaagatgatgaaggcggtggtgatcaagctatcattcttgatggtataaaaatggacactggagtagaagtctctgatattggaagccaagatgctcccataatactctcagatagtgaagaagaagaaatgatcattttggaaccagacaagaatccaaagaaaataagaacacagaccaccagtgcaaaacaagaaaaagcaccaagtaaaaagccagtgaaaagaagaaaaaagaagagagctgccaattaaagctaacagttgtatatctgtatatataactattaaaagggatatttattccatt

SEQ ID NO: 109 - DNA, 5504 bp, Homo sapiens
cacaaatctgtgattacctggcgggtgaaccgctccggtggcggggagagcgggctcccagcgctgggtaggggccgggttccggcgagcgccatcccggagcgtcagtttcccagtttgggaagtgaggagaacctgcctcgcccttccccgccaaggcttagggaagggactatggcagttccaagaggaaatcagggtctcgctctgttgctcaggctggattgcagtggcgtgatcatgcctcactgcagcctcgacctccctgggctcaagcaatcctcccacttcagcctccagagtggctgggaccacagtgtggctgtccagctgggctgagtcgcccaagaaggacgtgacaggtgccgacgccaccgccgagcccatgatcctggaacagtacgtggtggtgtccaactataagaagcaggagaactcggagctgagcctccaggccggggaggtggtggatgtcatcgagaagaacgagagcggctggtggttcgtgagcacttctgaggagcagggctgggtccctgccacctacctggaggcccagaatggtactcgggatgactccgacatcaacacctctaagactggagaagaggagaagtatgtcaccgtgcagccttacaccagccaaagcaaggacgagattggctttgagaagggcgtcacagtggaggtgatccggaagaatctggaaggctggtggtatatcagatacctgggcaaagagggctgggcgccagcatcctacctgaagaaggccaaggatgacctgccaacccggaagaagaacctggccggcccagtggagatcattgggaacatcatggagatcagcaacctgctgaacaagaaggcgtctggggacaaggaaactccaccagccgaaggcgagggccatgaggcccccattgccaagaaggagatcagcctgcccatcctctgcaatgcctccaatggcagtgccgtgggcgttcctgacaggactgtctccaggctggcccagggctctccagctgtggccaggattgcccctcagcgggcccagatcagctccccgaacctacggacaagacctccaccacgcagagaatccagcctggggttccaactgccaaagccaccagagcccccttctgttgaggtggagtactacaccattgccgaattccagtcgtgcatttccgatggcatcagctttcggggtggacagaaggcagaggtcattgataagaactcaggtggctggtggtacgtgcagatcggtgagaaggagggctgggcccccgcatcatacatcgataagcgcaagaagcccaacctgagccgccgcacaagcacgctgacccggcccaaggtgcccccgccagcaccccccagcaagcccaaggaggccgaggagggccctacgggggccagtgagagccaggactccccgcggaagctcaagtatgaggagcctgagtatgacatccctgcattcggctttgactcagagcctgagctgagcgaggagcccgtggaggacagagcctcaggggagaggcggcctgcccagccccaccggccctcgccggcctcttctctgcagcgggcccgcttcaaggtgggtgagtcttcagaggatgtggccctggaagaggagaccatctatgagaatgagggcttccggccatatgcagaggacaccctgtcagccagaggctcctccggggacagcgactccccaggcagctcctcgctgtccctgaccaggaaaaactcccccaaatcaggctcccccaagtcatcatcactcctaaagctcaaggcagagaagaatgcccaggcagaaatggggaagaaccactcctcagcctccttttcctcatccatcaccatcaacaccacttgctgctcctcctcttcctcctcctcctcttccttgtccaaaaccagtggcgacctgaagccccgctctgcttcggacgcaggcatccgcggcactcccaaggtcagggcaaagaaggatgctgatgcgaacgctgggctgacctcctgtccccgggccaagccatcggtccggcccaagccattcctaaaccgagcagagtcgcagagccaagagaagatggacatcagcactttacggcgccagctgagacccacaggccagctccgtggagggctcaagggctccaagagtgaggattcggagctgcccccgcagacggcctccgaggctcccagtgaggggtctaggagaagctcatccgacctcatcaccctcccagccaccactcccccatgtcccaccaagaaggaatgggaagggccagccacctcgtacatgacatgcagcgcctaccagaaggtccaggactcggagatcagcttccccgcgggcgtggaggtgcaggtgctggagaagcaggagagcgggtggtggtatgtgaggtttggggagctggagggctgggccccttcccactatttggtgctggatgagaacgagcaacctgacccctctggcaaagagctggacacagtgcccgccaagggcaggcagaacgaaggcaagtcagacagcctggagaagatcgagaggcgcgtccaagcactgaacaccgtcaaccagagcaagaaggccacgccccccatcccctccaaacctcccgggggctttggcaagacctcaggcactccagcggtgaagatgaggaacggagtgcggcaggtggcggtcaggccccagtcggtgtttgtgtccccgccacccaaggacaacaacctgtcctgcgccctgcggaggaatgagtcactcacggccactgatggcctccgaggcgtccgacggaactcctcctttagcactgctcgctccgctgccgccgaggccaagggccgcctggccgaacgggctgccagccagggttcagactcacccctactgcccgcccagcgcaacagcatccccgtgtcccctgtgcgccccaagcccatcgagaagtctcagttcatccacaataacctcaaagatgtgtacgtctctatcgcagactacgagggggatgaggagacagcaggcttccaggagggggtgtccatggaggttctggagaggaaccctaatggctggtggtactgccagatcctggatggtgtgaagcccttcaaaggctgggtgccttccaactaccttgagaaaaagaactagcagagggcctgggctcttccagcctcagtgtgcctctctggccgcccactggatgagcggtgagacgaacaaaagggaaaggaaaaaatgggggtggggggtggggggtggacaacattcaacactgcagaatgggtgacctcaaagatgccccctgtccaagccatcccacagctggaaggtaggggatgggggtgcccacactgagtgaggaagggaatggaccagggagtcccaggcctgggacccagagccaagaaagctgagatatcctgtgcaccatagggacttcaccaatggattacatgccatctgggacaggccatgtgggagaccccagttgtgcctttgctacagatctggaaaagacaaggtcatgggggcctccagtgtcctgcccctgcttggcccagttttgattgctggcatcttgccaccccaggtatccctggtattgtcctaagctgtatttgtgaattgtgctggtttcctgggcattgccacgcctaccacaggtgggtacattagaagccaccactggctttcaggcttgggggtgtcttctgagctcaagcctgcttctgggccaggccattgtcactgttagttgaagaaaaagcagttcccaggtgccagcaaagaccatctttcataactgtcactgtcttggccttgagaagagagcccgctctccgtggggcaccccatggaggacacagtaccagagtttacagagagggtgggcgaagccaccggtctcttcctaatctgcacagactattttgggtatttctgggcgggcagttcctttgcatgtttcgggagaggtttgttgatttggggcttatatgtcaggcctttggtttgcgtcttattttaggggttgtttgggggcctgggtggtcggcctcacatgggaaggagatgggtagtggatggggtttctgttgtatcttgtgggcgggtgattttgcttttgtttttgtttcacattcttccccctccacaagccaaagtcgtttcatttggtttccactgtgtggactgtgctggagcttggcgcctgccagaaaaatttggggctaggcaagccccaggttgcagacatggtgaagcagagaaactgttcttctggttcctgcacaacctcagaggggcaaaaaccctccccaggaaggaggagggtgttcaggagccagacttttggagagaaggcagctcccagcctgctgggtgaccgccattctgcgtgtgttccccagctgggcagggctggaagccttacgtatgaagcatggagaagcagccattgtccccactatgggcagaggggggacccggctggccccttgggtcagactggagccaacaccgccagccaccccctctggcctgctggcaatgccacaggtgcccaagaagatggaggatccctgtgccaggagccaacctggtcttcccgagggtcagtgccccagtgaagacagaagcgagagaataaagttccctgtaggtcctctgtcacctttgggttgtgtttttcaattgttgacatttcagaggggaccctccagaagcccagccggcttcccccaaggactcccccttcgctgggagtggatttccacacgtgcctttgatttcggacagattgggcctcacagccaccgattcagctgccagggtccctggactgggggttggtgttttctatagaggaggaaaggccctccctcaccctgctccccacccaggcagggcagcatgggacccagtgtctcagtgccttcaaaacccacccccacccctaccctaccccaccacaccccatcccagaggccttgcctgggcaaccctaagcccctgtccctcgccatacactgatgcctggcagctagagcaaatggctcgtgttctttgtcgaaggcctgtggtgagattgttttgtttccttttgttttgtgagtttgtttaaaattgaaattagttattttcttctgctggacagtattaaatagagcaggatgttgagttaatctgctagattgcagtactaatggtagtggtttagtgtcttcatgttaatattatttgtacttatttgaacaataatgataaagaagtggttcattattttttaattaatgcactttaaataaggtagaatggaaaaaacccagagagcaaagtgcattacttaaagatgcagtatatacttttctcatttttaaacagcacatatttattaagagaaaaaaagtaatttatgactatttaaaataaaatttaaaagtag

SEQ ID NO: 110 - DNA, 5699 bp, Homo sapiens
ggagttctcagacctccagtttcagccctgccctcagcctccaatccgtaagagacacccagccccagcaattggattgggcagcccgtcttgacacaccactgtgctgagtgcttgaggacgtgtttcaacagatggttggggttagtgtgtgtcatcacattcgagtggggattaagagaaggaaggctgccttgctggagctgtgtggtcttctccaagtgagagtcgcaggcaatagaactactttgcttttggaggaaaaggaggaattcattttcagcagacacaagaaaagcagtttttttttcagggattcttcacttctcttgaacaaggaactcactcagagactaacacaaaggaagtaatttcttacctggtcattatttagtctacaataagttcatccttcttcagtgtgaccagtaaattcttcccatactcttgaagagagcataattggaatggagaggtggtgctgacggccacccaccatcatctaaagaagataaacttggcaaatgacatgcaggttcttcaaggcagaataattgcagaaaatcttcaaaggaccctatctgcagatgttctgaatacctctgagaatagagattgattattcaaccaggatacctaattcaagaactccagaaatcaggagacggagacattttgtcagttttgcaacattggaccaaatacaatgaagtattcttgctgtgctctggttttggctgtcctgggcacagaattgctgggaagcctctgttcgactgtcagatccccgaggttcagaggacggatacagcaggaacgaaaaaacatccgacccaacattattcttgtgcctaccgatgatcaagatgtggagctggggtccctgcaagtcatgaacaaaacgagaaagattatggaacatgggggggccaccttcatcaatgcctttgtgactacacccatgtgctgcccgtcacggtcctccatgctcaccgggaagtatgtgcacaatcacaatgtctacaccaacaacgagaactgctcttccccctcgtggcaggccatgcatgagcctcggacttttgctgtatatcttaacaacactggctacagaacagccttttttggaaaatacctcaatgaatataatggcagctacatcccccctgggtggcgagaatggcttggattaatcaagaattctcgcttctataattacactgtttgtcgcaatggcatcaaagaaaagcatggatttgattatgcaaaggactacttcacagacttaatcactaacgagagcattaattacttcaaaatgtctaagagaatgtatccccataggcccgttatgatggtgatcagccacgctgcgccccacggccccgaggactcagccccacagttttctaaactgtaccccaatgcttcccaacacataactcctagttataactatgcaccaaatatggataaacactggattatgcagtacacaggaccaatgctgcccatccacatggaatttacaaacattctacagcgcaaaaggctccagactttgatgtcagtggatgattctgtggagaggctgtataacatgctcgtggagacgggggagctggagaatacttacatcatttacaccgccgaccatggttaccatattgggcagtttggactggtcaaggggaaatccatgccatatgactttgatattcgtgtgcctttttttattcgtggtccaagtgtagaaccaggatcaatagtcccacagatcgttctcaacattgacttggcccccacgatcctggatattgctgggctcgacacacctcctgatgtggacggcaagtctgtcctcaaacttctggacccagaaaagccaggtaacaggtttcgaacaaacaagaaggccaaaatttggcgtgatacattcctagtggaaagaggcaaatttctacgtaagaaggaagaatccagcaagaatatccaacagtcaaatcacttgcccaaatatgaacgggtcaaagaactatgccagcaggccaggtaccagacagcctgtgaacaaccggggcagaagtggcaatgcattgaggatacatctggcaagcttcgaattcacaagtgtaaaggacccagtgacctgctcacagtccggcagagcacgcggaacctctacgctcgcggcttccatgacaaagacaaagagtgcagttgtagggagtctggttaccgtgccagcagaagccaaagaaagagtcaacggcaattcttgagaaaccaggggactccaaagtacaagcccagatttgtccatactcggcagacacgttccttgtccgtcgaatttgaaggtgaaatatatgacataaatctggaagaagaagaagaattgcaagtgttgcaaccaagaaacattgctaagcgtcatgatgaaggccacaaggggccaagagatctccaggcttccagtggtggcaacaggggcaggatgctggcagatagcagcaacgccgtgggcccacctaccactgtccgagtgacacacaagtgttttattcttcccaatgactctatccattgtgagagagaactgtaccaatcggccagagcgtggaaggaccataaggcatacattgacaaagagattgaagctctgcaagataaaattaagaatttaagagaagtgagaggacatctgaagagaaggaagcctgaggaatgtagctgcagtaaacaaagctattacaataaagagaaaggtgtaaaaaagcaagagaaattaaagagccatcttcacccattcaaggaggctgctcaggaagtagatagcaaactgcaacttttcaaggagaacaaccgtaggaggaagaaggagaggaaggagaagagacggcagaggaagggggaagagtgcagcctgcctggcctcacttgcttcacgcatgacaacaaccactggcagacagccccgttctggaacctgggatctttctgtgcttgcacgagttctaacaataacacctactggtgtttgcgtacagttaatgagacgcataattttcttttctgtgagtttgctactggctttttggagtattttgatatgaatacagatccttatcagctcacaaatacagtgcacacggtagaacgaggcattttgaatcagctacacgtacaactaatggagctcagaagctgtcaaggatataagcagtgcaacccaagacctaagaatcttgatgttggaaataaagatggaggaagctatgacctacacagaggacagttatgggatggatgggaaggttaatcagccccgtctcactgcagacatcaactggcaaggcctagaggagctacacagtgtgaatgaaaacatctatgagtacagacaaaactacagacttagtctggtggactggactaattacttgaaggatttagatagagtatttgcactgctgaagagtcactatgagcaaaataaaacaaataagactcaaactgctcaaagtgacgggttcttggttgtctctgctgagcacgctgtgtcaatggagatggcctctgctgactcagatgaagacccaaggcataaggttgggaaaacacctcatttgaccttgccagctgaccttcaaaccctgcatttgaaccgaccaacattaagtccagagagtaaacttgaatggaataacgacattccagaagttaatcatttgaattctgaacactggagaaaaaccgaaaaatggacggggcatgaagagactaatcatctggaaaccgatttcagtggcgatggcatgacagagctagagctcgggcccagccccaggctgcagcccattcgcaggcacccgaaagaacttccccagtatggtggtcctggaaaggacatttttgaagatcaactatatcttcctgtgcattccgatggaatttcagttcatcagatgttcaccatggccaccgcagaacaccgaagtaattccagcatagcggggaagatgttgaccaaggtggagaagaatcacgaaaaggagaagtcacagcacctagaaggcagcgcctcctcttcactctcctctgattagatgaaactgttaccttaccctaaacacagtatttctttttaacttttttatttgtaaactaataaaggtaatcacagccaccaacattccaagctaccctgggtacctttgtgcagtagaagctagtgagcatgtgagcaagcggtgtgcacacggagactcatcgttataatttactatctgccaagagtagaaagaaaggctggggatatttgggttggcttggttttgattttttgcttgtttgtttgttttgtactaaaacagtattatcttttgaatatcgtagggacataagtatatacatgttatccaatcaagatggctagaatggtgcctttctgagtgtctaaaacttgacacccctggtaaatctttcaacacacttccactgcctgcgtaatgaagttttgattcatttttaaccactggaatttttcaatgccgtcattttcagttagatgattttgcactttgagattaaaatgccatgtctatttgattagtcttatttttttatttttacaggcttatcagtctcactgttggctgtcattgtgacaaagtcaaataaacccccaaggacgacacacagtatggatcacatattgtttgacattaagcttttgccagaaaatgttgcatgtgttttacctcgacttgctaaaatcgattagcagaaaggcatggctaataatgttggtggtgaaaataaataaataagtaaacaaaatgaagattgcctgctctctctgtgcctagcctcaaagcgttcatcatacatcatacctttaagattgctatattttgggttattttcttgacaggagaaaaagatctaaagatcttttattttcatcttttttggttttcttggcatgactaagaagcttaaatgttgataaaatatgactagttttgaatttacaccaagaacttctcaataaaagaaaatcatgaatgctccacaatttcaacataccacaagagaagttaatttcttaacattgtgttctatgattatttgtaagaccttcaccaagttctgatatcttttaaagacatagttcaaaattgcttttgaaaatctgtattcttgaaaatatccttgttgtgtattaggtttttaaataccagctaaaggattacctcactgagtcatcagtaccctcctattcagctccccaagatgatgtgtttttgcttaccctaagagaggttttcttcttatttttagataattcaagtgcttagataaattatgttttctttaagtgtttatggtaaactcttttaaagaaaatttaatatgttatagctgaatctttttggtaactttaaatctttatcatagactctgtacatatgttcaaattagctgcttgcctgatgtgtgtatcatcggtgggatgacagaacaaacatatttatgatcatgaataatgtgctttgtaaaaagatttcaagttattaggaagcatactctgttttttaatcatgtataatattccatgatacttttatagaacaattctggcttcaggaaagtctagaagcaatatttcttcaaataaaaggtgtttaaacttt

SEQ ID NO: 111 - DNA, 5020 bp, Homo sapiens
gacgcgaggcgggttcttggactgagtgtgcggcgcggtgcgccgccttccgaggctcctcccgcgggtggcagcggacggggcgcgcccctcggccagtcctcggtcctcaggcttgtggctccgttgagcaccggccgccgggcctctgggtccgtcgagtggagactctctgaaaagcgtgggctccgtggcctccggcgcggccgcggcgggtcggtctcctagatcatccgggaagcccacgggaccctcaggcgggcaggatgaacgactggcacaggatcttcacccaaaacgtgcttgtccctccccacccacagagagcgcgccagccttggaaggaatccacggcattccagtgtgtcctcaagtggctggacggaccggtaattaggcagggcgtgctggaggtactgtcagaggttgaatgccatctgcgagtgtctttctttgatgtcacctaccggcacttctttgggaggacgtggaaaaccacagtgaagccgacgaagagaccgccgtccaggatcgtctttaatgagcccttgtattttcacacatccctaaaccaccctcatatcgtggctgtggtggaagtggtcgctgagggcaagaaacgggatgggagcctccagacattgtcctgtgggtttggaattcttcggatcttcagcaaccagccggactctcctatctctgcttcccaggacaaaaggttgcggctgtaccatggcacccccagagccctcctgcacccgcttctccaggaccccgcagagcaaaacagacacatgaccctcattgagaactgcagcctgcagtacacgctgaagccacacccggccctggagcctgcgttccaccttcttcctgagaaccttctggtgtctggtctgcagcagatacctggcctgcttccagctcatggagaatccggcgacgctctccgaaagcctcgcctccagaagcccatcacggggcacttggatgacttattcttcaccctgtacccctccctggagaagtttgaggaagagctgctggagctccacgtccaggaccacttccaggagggatgtggcccactggacggtggtgccctggagatcctggagcggcgcctgcgtgtgggcgtgcacaatggtctgggcttcgtgcagaggccgcaggtcgttgtactggtgcctgagatggatgtggccttgacgcgctcagctagcttcagcaggaaagtggtctcctcttccaagaccagctccgggagccaagctctggttttgagaagccgcctccgcctcccagagatggtcggccaccctgcatttgcggtcatcttccagctggagtacgtgttcagcagccctgcaggagtggacggcaatgcagcttcggtcacctctctgtccaacctggcatgcatgcacatggtccgctgggctgtttggaaccccttgctggaagctgattctggaagggtgaccctgcctctgcagggtgggatccagcccaacccctcgcactgtctggtctacaaggtaccctcagccagcatgagctctgaagaggtgaagcaggtggagtcgggtacactccggttccagttctcgctgggctcagaagaacacctggatgcacccacggagcctgtcagtggccccaaagtggagcggcggccttccaggaaaccacccacgtccccttcgagcccgccagcgccagtacctcgagttctcgctgccccgcagaactcacctgtgggaccagggttgtcaatttcccagctggcggcctccccgcggtccccgactcagcactgcttggccaggcctacttcacagctaccccatggctctcaggcctccccggcccaggcacaggagttcccgttggaggccggtatctcccacctggaagccgacctgagccagacctccctggtcctggaaacatccattgccgaacagttacaggagctgccgttcacgcctttgcatgcccctattgttgtgggaacccagaccaggagctctgcagggcagccctcgagagcctccatggtgctcctgcagtcctccggctttcccgagattctggatgccaataaacagccagccgaggctgtcagcgctacagaacctgtgacgtttaaccctcagaaggaagaatcagattgtctacaaagcaacgagatggtgctacagtttcttgcctttagcagagtggcccaggactgccgaggaacatcatggccaaagactgtgtatttcaccttccagttctaccgcttcccacccgcaacgacgccacgactgcagctggtccagctggatgaggccggccagcccagctctggcgccctgacccacatcctcgtgcctgtgagcagagatggcacctttgatgctgggtctcctggcttccagctgaggtacatggtgggccctgggttcctgaagccaggtgagcggcgctgctttgcccgctacctggccgtgcagaccctgcagattgacgtctgggacggagactccctgctgctcatcggatctgctgccgtccagatgaagcatctcctccgccaaggccggccggctgtgcaggcctcccacgagcttgaggtcgtggcaactgaatacgagcaggacaacatggtggtgagtggagacatgctggggtttggccgcgtcaagcccatcggcgtccactcggtggtgaagggccggctgcacctgactttggccaacgtgggtcacccgtgtgaacagaaagtgagaggttgtagcacattgccaccgtccagatctcgggtcatctcaaacgatggagccagccgcttctctggaggcagcctcctcacgactggaagctcaaggcgaaaacacgtggtgcaagcacagaagctggcggacgtggacagtgagctggctgccatgctactgacccatgcccggcagggcaaggggccccaggacgtcagccgcgagtcggatgccacccgcaggcgtaagctggagcggatgaggtctgtgcgcctgcaggaggccgggggagacttgggccggcgcgggacgagcgtgttggcgcagcagagcgtccgcacacagcacttgcgggacctacaggtcatcgccgcctaccgggaacgcacgaaggccgagagcatcgccagcctgctgagcctggccatcaccacggagcacacgctccacgccacgctgggggtcgccgagttctttgagtttgtgcttaagaacccccacaacacacagcacacggtgactgtggagatcgacaaccccgagctcagcgtcatcgtggacagtcaggagtggagggacttcaagggtgctgctggcctgcacacaccggtggaggaggacatgttccacctgcgtggcagcctggccccccagctctacctgcgcccccacgagaccgcccacgtccccttcaagttccagagcttctctgcagggcagctggccatggtgcaggcctctcctgggttgagcaacgagaagggcatggacgccgtgtcaccttggaagtccagcgcagtgcccactaaacacgccaaggtcttgttccgagcgagtggtggcaagcccatcgccgtgctctgcctgactgtggagctgcagccccacgtggtggaccaggtcttccgcttctatcacccggagctctccttcctgaagaaggccatccgcctgccgccctggcacacatttccaggtgctccggtgggaatgcttggtgaggaccccccagtccatgttcgctgcagcgacccgaacgtcatctgtgagacccagaatgtgggccccggggaaccacgggacatatttctgaaggtggccagtggtccaagcccggagatcaaagacttctttgtcatcatttactcggatcgctggctggcgacacccacacagacgtggcaggtctacctccactccctgcagcgcgtggatgtctcctgcgtcgcaggccagctgacccgcctgtcccttgtccttcgggggacacagacagtgaggaaagtgagagctttcacctctcatccccaggagctgaagacagaccccaaaggtgtcttcgtgctgccgcctcgtggggtgcaggacctgcatgttggcgtgaggccccttagggccggcagccgctttgtccatctcaacctggtggacgtggattgccaccagctggtggcctcctggctcgtgtgcctctgctgccgccagccgctcatctccaaggcctttgagatcatgttggctgcgggcgaagggaagggtgtcaacaagaggatcacctacaccaacccctacccctcccggaggacattccacctgcacagcgaccacccggagctgctgcggttcagagaggactccttccaggtcgggggtggagagacctacaccatcggcttgcagtttgcgcctagtcagagagtgggtgaggaggagatcctgatctacatcaatgaccatgaggacaaaaacgaagaggcattttgcgtgaaggtcatctaccagtgagggcttgagggtgacgtccttcctgcggcacccagctggggcctgtctgtgcccctcctgccctgcaggctgtcctccccgcctctctgcagcctttcacttcagtgcccacctggctgacctgtgcacttggctgaggaagcagagaccgagcgctggtcattttgtagtacctgcatccagcttagctgctgctgacacccagcaggcctgggttccgtgagcgcgaactccgtggtggtgggtctggctctggtgctgccatctacgcatgtgggaccctcgttatcgctgttgctcaaaatgtattttatgaatcatcctaaatgagaaaattatgtttttcttactggattttgtacaaacataatctattatttgctatgcaatattttatgctggtattatatctgttttttaaattgttgaacaaaatactaaacttttacacgtctaaaaaaaaaaaaaaaaaa

SEQ ID NO: 112 - DNA, 3017 bp, Homo sapiens
accgcgggcatttacccgtgctttcccaagcctggaagaactcgtcatgctctttgtagcgtggtgcttctgttgctcacagaggtgcctgcttccccttctgccatgattggaagtttcctgaggcctccccagccatgtggaactgacaacttgcctttgatgattttcaagagagttgtgctatgatgtggcaaaagtatgcaggaagcaggcggtcaatgcctctgggagtaaggatccttttccacggtgtgttctatgccgggggctttgccattgtgtattacctcattcaaaagtttcattccagggctttatattacaagttggcagtggagcagctgcagagccatcccgaggcacaggaagctctgggccctcctctcaacatccattatctcaagctcatcgacagggaaaacttcgtggacattgttgatgccaagttgaagattcctgtctctggatccaaatcagagggccttctctacgtccactcatccagaggtggcccctttcagaggtggcaccttgacgaggtctttttagagctcaaggatggtcagcagattcctgtgttcaagctcagtggggaaaacggtgatgaagtgaaaaaggagtagagacgacccagaagacccagcttgcttctagtccatccttccctcatctctaccatatggccactggggtggtggcccatctcagtgacagacactcctgcaacccagttttccagccaccagtgggatgatggcctccctattccctgagacacaacagtattgaaattgggccaattaataactccacagtggcctctcactaaatgtgagaggtgaggaagctgcaggagaaaatttgaagctagcagtgttcatgagatgtaagtaaagaagccatctccataaaagtacaacgtgacgcagcaagtgctgatggagaagctgtagaagttacacagaagatctagcttggaccatcgatgaaagtggctacactaaacaacagattttaaatgtagataaaacagcattttattgaaaaaaagatgccatctaggactttcatagttagagaaactcaatgcctggcttcaaaggacaagctgactcttgtcaggggctagtgcagctgtgactttcagttaaagccaatgctcattgactattctgaaaatcccagggcccttaagatatgctgtataaacgcaacaacaaagcctggatggcgttgggtctgtttacagcctggtctactgagtaagcccactgttgagacctagtgctcagaaaaaatagatttctttcaaaatatggctgggtgcagtggctcacaccggtaatcccagcactttgggaggctggggcgggtggattgcttgatgccaggagttcaagaccagcctgggcaacatggtgaaaccctgtctcaaaaaacaaatccaaaaaaccaaaatattgctactcattaacaatgcacctggttacccaagagctctgatggagatgtacaaggagatgaatactgttttcatgcctgctaacacagtatccattctgctgctgatagatcaagaagtacttttgactttcaaaacttgttatttaagaaatacattttgtggtttctctgatggttctgggcagtcagttcaaaaccttctggaaaggattcaccattctagatgccatcaagagcattcaattcacgggaggaggtcaaaatatcaacattaattggaatttggaagaaatagattccaatcctcatggaggacttggagggtttcaagacttcagaggaggaaggaactgtagatgggctgaaaatagcaagagaactagaagtggaggggcctagagatgtgaccgaattgctgtaacctcaggatcaaacttgtatggatgagaagttccttctcatggacgagcaaagaaggtgatttcttgaaatggaatctactcctggtgaagatgctatgaacattgttgaaatgacaaaagatttagaatattccataaacttagctgtggccagggtttgagaggattgactcctaattttgaagttctactgtgggtaaatgctgtcaaacagcattgcatgccacagaggaatctctcatgaaagagttaataaatgcagcaaacttcactgttgtcttactttaagaaactgccacagtcactgcaggcttcagcaacttatcttttcctaccctcctctcgcatttaaaagtacttttaaattaatgtatgtacattatttttaggcataacactgctgctcatttaaaaaaactacagtatgaaccatgttatatgcagtggaaaggcaaaaaattcatgtgacttacttgcttgtatttggtttattgcagtggtctggaactgaaagtgatgcgtatttctgagttatgcctgtatttaagaagctgagtgaaacccaaagaagtccatgataggacagacttctgaaaactaaagacagaaaaaagcttgaaagcatcaagaaagaagtgaaatcttaactagagggaaaagtaactcagatgacagtggatttctctctggaaaccatggaggccagaaggaagtgagacaagttcttttagtgccagaagaactatcaacttgtggctgggcacggtggctcacacctgtaatcccagcactttgggagaccaaggtgggcagatcacttgaagtcaggagtttgagaccagcctgaccaacatggcaaaaccctgtctctactaaaaatacaaaaattagccaggcatggtggcacatgcctgtaatctcagctacttgggaggctgaggcacgagaattacttgaacccgggaggtggaggttgcagtgagccaagatcctgccactgcactccagcctgggcaacagagcaagactgcctcaaaacaaaactctgtcaactccaaattcctatttggtgaaatgatccttcaggattgatggggtaataaaaacattctcggttgatagaaaact

SEQ ID NO: 113 - DNA, 1922 bp, Homo sapiens
accagaggtttcccagagaggaaggcgtggctccctcccgggccagtgagccctggcgccgccgcggccgcggtcccagcagcggagtagggcggcggctgcgccccgcaccatggggggcagcccagccccagccgcggtaaacgccgacctccgccgccgcccgcgccgcgtctgccccctcccgctgcggctctctggacgccatcccctcctcacctcgaagccaacatgaaggagacccggggctacggaggggatgcccccttctgcacccgcctcaaccactcctacacaggcatgtgggcgcccgagcgttccgccgaggcgcggggcaacctcacgcgccctccagggtctggcgaggattgcggatcggtgtccgtggccttcccgatcaccatgctgctcactggtttcgtgggcaacgcactggccatgctgctcgtgtcgcgcagctaccggcgccgggagagcaagcgcaagaagtccttcctgctgtgcatcggctggctggcgctcaccgacctggtcgggcagcttctcaccaccccggtcgtcatcgtcgtgtacctgtccaagcagcgttgggagcacatcgacccgtcggggcggctctgcacctttttcgggctgaccatgactgttttcgggctctcctcgttgttcatcgccagcgccatggccgtcgagcgggcgctggccatcagggcgccgcactggtatgcgagccacatgaagacgcgtgccacccgcgctgtgctgctcggcgtgtggctggccgtgctcgccttcgccctgctgccggtgctgggcgtgggccagtacaccgtccagtggcccgggacgtggtgcttcatcagcaccgggcgagggggcaacgggactagctcttcgcataactggggcaaccttttcttcgcctctgcctttgccttcctggggctcttggcgctgacagtcaccttttcctgcaacctggccaccattaaggccctggtgtcccgctgccgggccaaggccacggcatctcagtccagtgcccagtggggccgcatcacgaccgagacggccattcagcttatggggatcatgtgcgtgctgtcggtctgctggtctccgctcctgataatgatgttgaaaatgatcttcaatcagacatcagttgagcactgcaagacacacacggagaagcagaaagaatgcaacttcttcttaatagctgttcgcctggcttcactgaaccagatcttggatccttgggtttacctgctgttaagaaagatccttcttcgaaagttttgccagatgagaaaaagaagactcagagagcaagagatggggcctgatggaaggtgtttttgtcatgcatggaggcaggtccccaggacttggtgcagttctcatgatagagaaccctgcagtgtccagctaagctgatgacttgaagataaatctgcctaaccctgggatgaagtatctgtgaactattttgacagcagatgaggaattttggggaaattaaaacctgcctttctgccaggatcacatcactggaagctccatgactctctttttgtaaaagaaaaaaaaatcacagaaacacccacctcccaaactattctcttttacttcttcccccaagcccacccccaaatataactgttatccagaagctgttatgtcctgtttccatacatgtttttgtacttttactatatctacatacatcaattaaacttatgtcctattgttttgtgaatttatatttgcgtatacattatcatatgtaaaatttgcatttttttattgaaaattatgtttcttgagatttatccacattgaaacatggagctctaaatcgttaattttaaccgctatagagtattccataatttgaataaagcataatttgtttgtac

SEQ ID NO: 114 - DNA, 5417 bp, Homo sapiens
agaaggtagcagacagacagacggatctaacctctcttggatcctccagccatgaggctgctctgggggctgatctgggcatccagcttcttcaccttatctctgcagaagcccaggttgctcttgttctctccttctgtggttcatctgggggtccccctatcggtgggggtgcagctccaggatgtgccccgaggacaggtagtgaaaggatcagtgttcctgagaaacccatctcgtaataatgtcccctgctccccaaaggtggacttcacccttagctcagaaagagacttcgcactcctcagtctccaggtgcccttgaaagatgcgaagagctgtggcctccatcaactcctcagaggccctgaggtccagctggtggcccattcgccatggctaaaggactctctgtccagaacgacaaacatccagggtatcaacctgctcttctcctctcgccgggggcacctctttttgcagacggaccagcccatttacaaccctggccagcgggttcggtaccgggtctttgctctggatcagaagatgcgcccgagcactgacaccatcacagtcatggtggagaactctcacggcctccgcgtgcggaagaaggaggtgtacatgccctcgtccatcttccaggatgactttgtgatcccagacatctcagagccagggacctggaagatctcagcccgattctcagatggcctggaatccaacagcagcacccagtttgaggtgaagaaatatgtccttcccaactttgaggtgaagatcacccctggaaagccctacatcctgacggtgccaggccatcttgatgaaatgcagttagacatccaggccaggtacatctatgggaagccagtgcagggggtggcatatgtgcgctttgggctcctagatgaggatggtaagaagactttctttcgggggctggagagtcagaccaagctggtgaatggacagagccacatttccctctcaaaggcagagttccaggacgccctggagaagctgaatatgggcattactgacctccaggggctgcgcctctacgttgctgcagccatcattgagtctccaggtggggagatggaggaggcagagctcacatcctggtattttgtgtcatctcccttctccttggatcttagcaagaccaagcgacaccttgtgcctggggcccccttcctgctgcaggccttggtccgtgagatgtcaggctccccagcttctggcattcctgtcaaagtttctgccacggtgtcttctcctgggtctgttcctgaagcccaggacattcagcaaaacacagacgggagcggccaagtcagcattccaataattatccctcagaccatctcagagctgcagctctcagtatctgcaggctccccacatccagcgatagccaggctcactgtggcagccccaccttcaggaggccccgggtttctgtctattgagcggccggattctcgacctcctcgtgttggggacactctgaacctgaacttgcgagccgtgggcagtggggccaccttttctcattactactacatgatcctatcccgagggcagatcgtgttcatgaatcgagagcccaagaggaccctgacctcggtctcggtgtttgtggaccatcacctggcaccctccttctactttgtggccttctactaccatggagaccacccagtggccaactccctgcgagtggatgtccaggctggggcctgcgagggcaagctggagctcagcgtggacggtgccaagcagtaccggaacggggagtccgtgaagctccacttagaaaccgactccctagccctggtggcgctgggagccttggacacagctctgtatgctgcaggcagcaagtcccacaagcccctcaacatgggcaaggtctttgaagctatgaacagctatgacctcggctgtggtcctgggggtggggacagtgcccttcaggtgttccaggcagcgggcctggccttttctgatggagaccagtggaccttatccagaaagagactaagctgtcccaaggagaagacaacccggaaaaagagaaacgtgaacttccaaaaggcgattaatgagaaattgggtcagtatgcttccccgacagccaagcgctgctgccaggatggggtgacacgtctgcccatgatgcgttcctgcgagcagcgggcagcccgcgtgcagcagccggactgccgggagcccttcctgtcctgctgccaatttgctgagagtctgcgcaagaagagcagggacaagggccaggcgggcctccaacgagccctggagatcctgcaggaggaggacctgattgatgaggatgacattcccgtgcgcagcttcttcccagagaactggctctggagagtggaaacagtggaccgctttcaaatattgacactgtggctccccgactctctgaccacgtgggagatccatggcctgagcctgtccaaaaccaaaggcctatgtgtggccaccccagtccagctccgggtgttccgcgagttccacctgcacctccgcctgcccatgtctgtccgccgctttgagcagctggagctgcggcctgtcctctataactacctggataaaaacctgactgtgagcgtccacgtgtccccagtggaggggctgtgcctggctgggggcggagggctggcccagcaggtgctggtgcctgcgggctctgcccggcctgttgccttctctgtggtgcccacggcagccgccgctgtgtctctgaaggtggtggctcgagggtccttcgaattccctgtgggagatgcggtgtccaaggttctgcagattgagaaggaaggggccatccatagagaggagctggtctatgaactcaaccccttggaccaccgaggccggaccttggaaatacctggcaactctgatcccaatatgatccctgatggggactttaacagctacgtcagggttacagcctcagatccattggacactttaggctctgagggggccttgtcaccaggaggcgtggcctccctcttgaggcttcctcgaggctgtggggagcaaaccatgatctacttggctccgacactggctgcttcccgctacctggacaagacagagcagtggagcacactgcctcccgagaccaaggaccacgccgtggatctgatccagaaaggctacatgcggatccagcagtttcggaaggcggatggttcctatgcggcttggttgtcacgggacagcagcacctggctcacagcctttgtgttgaaggtcctgagtttggcccaggagcaggtaggaggctcgcctgagaaactgcaggagacatctaactggcttctgtcccagcagcaggctgacggctcgttccaggacccctgtccagtgttagacaggagcatgcaggggggtttggtgggcaatgatgagactgtggcactcacagcctttgtgaccatcgcccttcatcatgggctggccgtcttccaggatgagggtgcagagccattgaagcagagagtggaagcctccatctcaaaggcaaactcatttttgggggagaaagcaagtgctgggctcctgggtgcccacgcagctgccatcacggcctatgccctgtcactgaccaaggcgcctgtggacctgctcggtgttgcccacaacaacctcatggcaatggcccaggagactggagataacctgtactggggctcagtcactggttctcagagcaatgccgtgtcgcccaccccggctcctcgcaacccatccgaccccatgccccaggccccagccctgtggattgaaaccacagcctacgccctgctgcacctcctgcttcacgagggcaaagcagagatggcagaccaggcttcggcctggctcacccgtcagggcagcttccaagggggattccgcagtacccaagacacggtgattgccctggatgccctgtctgcctactggattgcctcccacaccactgaggagaggggtctcaatgtgactctcagctccacaggccggaatgggttcaagtcccacgcgctgcagctgaacaaccgccagattcgcggcctggaggaggagctgcagttttccttgggcagcaagatcaatgtgaaggtgggaggaaacagcaaaggaaccctgaaggtccttcgtacctacaatgtcctggacatgaagaacacgacctgccaggacctacagatagaagtgacagtcaaaggccacgtcgagtacacgatggaagcaaacgaggactatgagtacgatgagcttccagccaaggatgacccagatgcccctctgcagcccgtgacacccctgcagctgtttgagggtcggaggaaccgccgcaggagggaggcgcccaaggtggtggaggagcaggagtccagggtgcactacaccgtgtgcatctggcggaacggcaaggtggggctgtctggcatggccatcgcggacgtcaccctcctgagtggattccacgccctgcgtgctgacctggagaagctgacctccctctctgaccgttacgtgagtcactttgagaccgaggggccccacgtcctgctgtattttgactcggtccccacctcccgggagtgcgtgggctttgaggctgtgcaggaagtgccggtggggctggtgcagccggccagcgcaaccctgtacgactactacaaccccgagcgcagatgttctgtgttttacggggcaccaagtaagagcagactcttggccaccttgtgttctgctgaagtctgccagtgtgctgaggggaagtgccctcgccagcgtcgcgccctggagcggggtctgcaggacgaggatggctacaggatgaagtttgcctgctactacccccgtgtggagtacggcttccaggttaaggttctccgagaagacagcagagctgctttccgcctctttgagaccaagatcacccaagtcctgcacttcaccaaggatgtcaaggccgctgctaatcagatgcgcaacttcctggttcgagcctcctgccgccttcgcttggaacctgggaaagaatatttgatcatgggtctggatggggccacctatgacctcgagggacacccccagtacctgctggactcgaatagctggatcgaggagatgccctctgaacgcctgtgccggagcacccgccagcgggcagcctgtgcccagctcaacgacttcctccaggagtatggcactcaggggtgccaggtgtgagggctgccctcccacctccgctgggaggaacctgaacctgggaaccatgaagctggaagcactgctgtgtccgctttcatgaacacagcctgggaccagggcatattaaaggcttttggcagcaaagtgtcagtgttggc

SEQ ID NO: 115 - DNA, 224931 bp, Homo sapiens
gtttacacgctccggggcctgtaggcgccgcgagttccggctgtcgccgtcgccgccgcggctcctggaggtcggttgcgacgagtaacggcgccaggacgagccctgcgccttctttttcgatatgtacccgaattggggccggtatggcgggagcagccactatccgccgccaccggtcccaccgccgccgccagtggcgcttcctgaggcctcgccggggcccgggtactcgagctcgacgactcccgcggccccctcctcctcgggcttcatgagcttccgcgaacagcacttggcgcagctccagcagctgcagcagatgcaccagaagcaaatgcagtgcgtgcttcagccccaccaccttcctccgccccctctgccgcccccgccagtgatgccggggggcggctacggagactggcagccgccaccgccaccgatgcccccgccacccgggccggccctcagctatcagaagcagcagcagtacaaacaccagatgctccaccaccaacgagacgggcctcctggtttggttccaatggagctggaatccccccctgaatctccccctgtgccgcctgggtcctatatgcccccatctcagtcttacatgcccccacctcagccgccaccctcttactaccccccgacctcatctcagccctacctgcctcctgctcagccgtccccttcgcagtccccaccttcccaatcctacctggcgcccaccccttcttactcatcctcctcctcttcctcgcaatcctatttgagccattcccagtcctacttgccctcttctcaggcatctccttcccgcccctcccagggccattctaaatcccaactactagctccaccaccaccgtccgccccccctggaaataagacaactgtccagcaagagcctttggagagtggggccaaaaacaagagtactgaacagcagcaagccgcccctgagccagatccctctacgatgactccacaggaacagcagcagtattggtatcgacagcacttgcttagtttgcaacagaggacaaaagttcatttgccaggacacaaaaagggtcctgtggtagcaaaggatacaccagagccggtaaaagaagaagttacagtacctgccaccagtcaagttccagaatctccttcttctgaggagcccccattgccacctccaaatgaggaagtgccacctcctctcccacctgaggaaccccagtctgaggacccagaagaagatgccaggttaaagcagttgcaggctgcagcagcacactggcagcagcaccagcagcatcgagtcggtttccagtatcagggaataatgcagaagcacactcagttacagcagattctacaacagtatcagcagattatacagcccccaccacatatacagaccatgtctgtagatatgcagctgcggcattatgagatgcagcagcaacagtttcaacatctttaccaagaatgggagcgagagtttcagctatgggaggaacaactccattcctatcctcataaagatcagcttcaggagtatgagaagcagtggaaaacatggcagggacatatgaaagccactcagagctatctccaggagaaagtcaattcatttcagaacatgaagaaccagtatatggggaacatgtcaatgccacctccttttgttccatattctcagatgcctccacctctacctacaatgccccctccagtgttgcctccttcattgccaccaccagtgatgccccctgccctccctgctacagtgccaccacctggcatgcccccacctgttatgccaccttctctaccaacctctgttcccccaccagggatgcctccttctctctcttctgcagggccaccaccagttctccccccaccttccctgtcttctgcagggccaccaccagttcttcccccaccatctctctcttcaacagcacctccacctgtcatgcccctcccaccattgtcttcagctacacctcctccaggaatacctccccctggagttccacaagggatacctcctcagttaacagcagccccagttccaccagcctccagttcacagagctcgcaagttccagagaaacctagaccagcactgcttcctactcctgtgtcttttggttctgccccaccgacaacttaccatcctccgttgcaatcagctggtccatcagaacaagtgaattcaaaagctcctttgagcaagtctgctctgccatacagttcattctcatctgatcaaggacttggggagtcttcagctgctccatctcagccaatcactgcagtgaaggacatgccagtgagatcaggtggcctgcttccagatcctcctagaagtagttacttggaaagtccaagaggcccaagatttgatggtcctcgaagatttgaggatttagggtcaaggtgtgaaggaccgagacccaaagggcctcgttttgaaggaaatcgccccgatgggccaagacccagatatgaaggtcacccagcagagggcactaaaagcaagtggggaatgattccccgggggccagcatctcaattttatattacccccagtacatccctaagtcctcgacagagtggaccacagtggaaaggccccaaaccagcttttggacagcagcatcagcagcaacctaagtcacaagcagaacctctttcaggaaacaaagaaccattagcagacaccagtagtaaccagcagaagaattttaaaatgcaatcagctgcattttccattgctgcagatgtaaaggatgtcaaggcggctcagtcaaatgagaatctaagcgactctcaacaagagccacctaaaagtgaagtctcggaagggcccgtagagccctctaattgggaccagaatgttcaaagtatggagactcaaatcgacaaagcccaagctgttactcagcctgtaccccttgcgaataagcctgtacctgctcaatctacttttccttcaaaaacaggggggatggagggaggaacagcagtagcaacatcatcattaacagcagataatgattttaaacctgtgggtattggtctaccccattcagaaaacaaccaagataaaggcctgcctcggccagataatagagataatagattagaaggcaatagaggcaacagctcatcttacagaggtcctgggcaaagcagaatggaagacacacgggataaaggtctagtaaacagaggtcgcggccaggcaatcagtcgaggcccaggattggtcaagcaagaagactttcgggataagatgatgggtagaagagaagatagtcgagagaagatgaacagaggagaaggtagccgggacagagggttggtgaggcctggaagcagtcgggagaaagtgccaggtggtcttcaagggagccaggacaggggtgcagctggcagccgagaaaggggaccacctcggagggctggcagtcaggagaggggacctcttcgaagggctgggagtagagagagaataccaccccgaagagctgggagcagggagagaggaccacctcgagggcctggcagtcgagaaaggggactgggaagatcagattttggtcgtgatagaggtccattcagaccagaaccaggagatggtggggaaaaaatgtatccatatcaccgggatgagcctcctagggctccatggaaccatggagaagagcgagggcatgaagagtttccattagatggtagaaatgctccaatggaacgagaaagactcgatgactgggatagagagagatactggagagaatgtgaacgtgactatcaagatgatacactagagctctataacagagaggacaggttctcagcaccaccatctcggtctcatgatggagataggcgaggcccttggtgggatgattgggagagagaccaggatatggatgaggactacaatagggaaatggaaagggacatggacagggatgtggatcggatttcaagacctatggatatgtatgatagaagtttggataatgagtgggacagagattatgggagaccactggatgaacaagaatcacagtttcgtgaacgggatattccatctcttccacctttaccgcccctcccacctcttccacctttggatagatatcgggatgatagatggagagaagaaagaaatcgagagcatgggtatgatcgagatttccgtgataggggtgagttgaggattcgagagtatccagaaagaggagatacatggcgggaaaagcgagattatgttcctgacagaatggactgggaaagagaacggttgtcagacagatggtacccatctgatgtggatagacattcccccatggcggaacatatgccctcctcacatcattcctcagaaatgatggggtccgatgcaagcttagactctgaccaaggccttggaggggtaatggttctcagtcagaggcagcatgaaatcattttgaaagctgcacaagaactgaaaatgcttcgggaacagaaagaacagcttcaaaagatgaaagacttcgggtctgagccacagatggctgaccatctaccacctcaggaatcaagattgcagaatacatcttcaagacctggaatgtatccgcctccagggtcgtatagacctccccctcctatgggcaaaccaccaggttcaattgtaagaccctctgctccaccagcaagatcatctgttcctgtgaccaggccacctgtcccaataccaccacctccacctcctccacctctacctcctcctcctccagtgataaagccacaaacttcagctgtagaacaggaacgatgggatgaagattctttctatgggctctgggatacaaatgatgaacaaggactgaattcagaatttaagtcagaaactgcagcaattccatctgctccagtattaccacccccacctgttcactcttccattccccctcctggcccagtgcctatgggtatgccaccaatgtccaagccaccaccagtacaacagactgttgattatggccatggccgagatatatccactaataaagttgaacagataccttatggagaaagaataactctacgcccagatccactacctgaaagatcaacttttgagacagagcatgcaggccaacgtgatcgttatgatagagaaagagatcgtgagccttattttgatcgtcaaagtaatgtcatagcagatcatcgagattttaaaagggatcgtgagacacatagagatcgagaccgggatcgtggtgttattgactatgaccgggatcgatttgacagagaacgccgaccccgagatgatagagctcagtcatatcgagacaaaaaagaccattcctcatccagaagagggggttttgataggccatcctatgaccggaagtctgaccgaccagtctatgaaggaccatccatgtttggaggagaacgaaggacttatcctgaggagcgaatgcctctgccagctccttcactgagccaccagcctcctccagctccacgagtcgagaagaagcctgaatcaaagaatgtggacgatattttgaaaccaccgggccgggagagcagacctgagagaattgttgttataatgagaggattacctggcagtggaaagacacatgttgcaaaacttattcgagataaggaggtagaatttggaggacctgcacccagagttctaagcctggatgattacttcatcactgaagtggaaaaagaagaaaaagatccagattctggaaagaaagtgaaaaagaaggtaatggaatatgaatatgaagctgagatggaggagacttaccgcaccagcatgttcaaaactttcaaaaagactctggatgatggcttttttcccttcatcatcctggatgccatcaatgacagagttaggcattttgaccagttttggagtgcagcaaaaaccaagggatttgaggtatatttggctgaaatgagtgcagataaccagacttgtggcaagagaaatattcatggaagaaagcttaaagaaataaataagatggctgatcactgggaaactgcacctcgtcacatgatgcgtctagatattcgttctttgctgcaagatgctgctattgaagaggtagagatggaagattttgatgcaaatatcgaagaacagaaagaagaaaagaaagatgcagaggaagaggaaagcgaactgggttacattccgaaaagcaaatgggagatggacacatctgaggcaaagctagacaagttggatggcttgaggactggtactaaaaggaaacgtgactgggaggccattgccagcagaatggaggattatcttcagctccccgatgattatgatactcgtgcttctgaagccaaggcctcgcggagcttctttgtgtgtcaccttgcttccacgtttcagttcttgttttgtttctactgctttagttttttttaaagttctccagtgtccccaagaggtattagaatcttgctgtacccaagcaagacgttaatttttcttttaactgttttggggagggagggagtgatagcttaactgctgaagccaggcgggggtctgctggaggattccaacagagagtatttcctccactgtacaatgtcacagactatctctatcatcattgctttgtggctgtttctgttttttactgtatgtaactggtagctgattgtactaggattaaaaacaataaactttcatgataaagccgatgagattcatgggctatacagcgctcctaaaatctttgtggtaaccttactcttttttaatgtacaaatgagagtcctggccaggtgcagtggctcacacctgtaatcccagcactttgggaggccaaggttggaggatcactgggcccaggagtttgagatcagccttggcaagatggtgagattccatctctacaaaaaatcaaaatattattcaggcgtcgtagcacacacctgtggtctcagctacttgggaagctgaggctggagaactgctcgagcgcgggagttgaagtctgccatgagccatgatctcggcacacactccagcctgggtgacggagcgagaccctgtctcaaaaaataaattaataaataacaaaaaataaaaattagaatccttattgctcataagaaaagaactctagctgggcacagtggctcccacctgtaatcccagcacttcgggaggccaagaggggtagatcacctgagatcaggaatttgagaccagcttggccaacatggtgaaacaccatctctattaaaaatacaaaagaaattagctgggcattgtggcgggcacctgtagtcccagctactcaggaggctgaggcaggagaatcacttgaacccaggcggcagaggttgcagtgagctaagattgtgccactgcactccagcctgggtgacagagtgagactctcaaaaaaaaaaaaaaaaaaaaaaaaaagaactccaatttatataccagctgagagagacaggctaggtggactccagccctccctgctttgcaatcctagggccatgggctcagctctcccacagcattcagttcatgtagtcagcatggtgggtttggctctgtttgctcaacaagactgcaaacatgaacagctgtatctcagacacctgactcagaaccttacacacactggaggtgcttagttgcatggaattgtgatcttacagcttgaggcaggtaactccagtgggaacaaaacttaatgagtatcaggggataattcccagagaaccgatataaacagctgcccaacagaccaggtctgggacaaggcaattcccactgcatccaagtgacggataagtgcaggggagaaggggtcagggttcatggcagggcgttttagggaaagtctactctgccccctgaaatctctctcccacctcttcacgaatacttctgatttctgaaacaagatgctaaggcactcggtcagcacttagaaatgcatctgcccaagaggagatcaaagagaatgttttcatttactctgaagtataaagattgggtaaagacccagcacggtggctcacacctgtaatcccagcactttgggaggccaaggcaggtggatcatgaagtcaggagatcaagaccatcctggccaacatggtgaaacccatctctactaaaaatacaaaaatcagctgggcgtggtggcaggcacctgtaatcccagctactcgggaggctgagacaggagaattgcctgaacgcaggagtcagaggttgcagtgagctgagatcgtggcactgcactccagcctggcgacagagtgagactccctcccgccgccccccctcccaaaaaaaagattggggatagactctttcctaagcgttcttgacaggggaaaaaggttagggggcataaaggttttcagggtgtggaaagtaaaaatggattttcaggtagaacatgagaaagagaaagggctggaaaagaaggctgggatacaagcgtatgggatacacatcagctttggctgcaagttacagaagctggctctggcaaacataagtggcgaaagagaatttgttggaaagatacatggtactgaaggaggccttcaacactcaggcctgagaagggaccagggcagctttgggggtctgggtagcgggaactcatgagctgtctggctttggatgattctaaagcaactgccttccattatgggtaatgactccaactcagattcaaattccccaggaaaaagtctgacagatcttgggtctatgctcaccctttgagaatggagggttgggagagtcctgtggctggcagccccaccaggaatgcatggaattggggagtttgagtttcccaaaggaaagctgagtttctgttactcaaggaagggaagaagtgctgggcatatgtgcacagcagatgttctctacacatgggatgtcaattgagagaggtgggggatggatggggtgggggatgggaatttccaggacgctgcagaacctgccataggggccaaggctcctgccacagccctggattgcatctccctctcctcctataaaagcaagctcaggaaaagaacattgtttctgttcttgacagctccatagaattgtctccttagcttccagtcacgctcagctcctgctagaataattaccacccacctgttctccatacaagaattcacagccagtggacacacatctggcctgtaaaagacatgcttggaagtctcccaggctgcttggaacaggcaggagacaacacagggtcagccactaattcaaaggcaaggaaacagctggcctgagagctatggtcactggagcctaagtggcagcgaactcctcccctgccaggcagctcaatggatgtgggacaggtgtgtcctgagacaaacaaaccccctgagactcagaggaggtttgagtgctgggccctgtcctcttcttccagcacatggctgtcttccccacccccatctgcttctctagtgggtggagggggctaataccctgcctttcttggagttcctttatttttcttcccattactgtttacatcactcccttctaaacaccatggaaattaagaaaaggccaggtaaagttttaatggggagggccagaaatattttggtggtgaaggtaattgcatccaagttttaaggatgtggatgcagaattggaagggagcagggcgcggtggctcacgcctgtaatcccaacaatttgggaggtcaaggcaagtggatgtcttgagaccagaagttcgagaccagcctggccaacatggtgaaaccccatctctactaaaaacaaaaattaaccaggcatggtggcacacacccgtaatcccagctactcaggaggctgaggcaggagaatagcatgaacccatgaggcagaggttgcagtgagccaagatcgcaccactgcactccagcctgggcaactgagcgagactgtctcaaagaaaaaaaaaatggaattggaaggggactgactgagagagcctctaggccagcggttttcaacttttttttttttttttttttgagcaaaacctttgtgcagtgtttcagcattcaacaaatatttactgaatgccaactctgtcccaggtgctgtgctaggggatacagcagcatgcaatccagacctgattccagcccttgtgagcatacagtgtagtggaggagacagacactgggaaaataattagataagtagatcaacagtgagctgcaattgaagtagagctaagaaagagacgtatgcagctagatgacctaatacagacttgggaggggatttggggaaggtatccccaaaggaatgacattggagctgagatctgaagggtgcacagaactcagaaaggaggtatggaggaggacggtcaggaggagatgtcataagatcctggaggtaggaaggctcttgtgctggaggaactcacaggcaaggcaagcagagtagtgtgggatgcaggggctagggattcagggaccagactgccaggggttcaggagtcagatccaagatgtgaacaggaaactggggagctcctgtggctggaaaggggcccgcccttgatctctccccaaacaccccaacacacatacttccctttgccttatagcctctgaggcatcttggaggaacgttggggcttgtccgaataccgcttgaaaaccacaaatccagccctattgccattttcagatgtgaagactgagaatcaacaattgccccctcccagtgccctctctgttaactctgggcagctaatccagcctccctggagagagtgtgatgcggtgacagactctgaggacactgcagacagctcagtgtttcaggaatgatggggacagccttgagagccagcccagggctctggcatggggaatggaccccaaagatgagaggttggcccagtctggggcactcagtcttttctgcctgtgctgggagagtctctgaccctcttagcccatccccatcattcatccagaggcgcaggcaggccgcctgccaggatagcagatcccactcagctctggcctcaacattcctctccccgccggggggaaaggtcaagtgtaggatattttcccaagccctggagaacagcagcacctcctgatatctacagctactacccagcttgaagggcaactaccagggcagacaggcaggacgggagagcagtcagctggccctctaagcagggctgcagggggaagggactggggaggcagggcctgaaatatatcaacaacttcagccccaagaagtagagtagagagtgggtgatgggaaaagggcttgcatggcaggggtctgaggctgaggctccgtctgcctcaggaaggctaaaacgttcctgcttcaacccagctggtcctcatttaactaactccagggtctggcctctctggagaccccctgctggcccgtctgcagctcctggagcagaagccaaaagcagccaccagcttagagacagcagctgaacccagagccccccaagcaggagacaggcagtgcaggcattgcaggcccctttgcaaccctgcaaggagtcaaaagccaagtaggtggggctggggggaaggcttcagagataaagaaggcagaggcaattgtctctaagccagatcaggagcagctatggagagaaaaatctcttggagcctggaaggtggtttcatcagtcaaggctgtcctaaggcaaactatgcaacagtagcctcccttcttcccccgtctcccttctgcccctcatccagcacactgctctgtgagcactgggcacttgccatcctgccatcctcccccaggggaaggcaggtacagaggaacaagggagcaggtgccagaaggcctgaattcaaatctagctgctccctattctagccgtgtgaccttcggcaaagatctgaacctctgagactctgctcctgcttctgtaaaaatgggatggataagagctatgtcataggactgtagaaatgattgaatgagaaaatgaaggtaaagatcttaggtcttattgagtttgccatggatactcctcatgggacaagagagagagaagggggaagtggggaagtactggggactgttgaatgatccaaatgggatgcctgatgaatggggcagctcccaaatgtttcaaccctgtttccaaggtagaggctgggccagagagtgggtggtgagggcctgaggtagggaaagttattctgtattgaaaagaaaacagagagaggaagtcagatctcacgacgtgcgtcagccaagagcctgggcagacagtgtctcctccagaggaagggctggtactccggcactctgttgccctctggcagccgctaagctcctgttttcctcattaagctgtccgcaacctggccccctttacactgctgataagggccagaaacaattcagaatccccaacagatggcatctgtggttttcaatgtcacctcccgatggaatcaacaaggtggggctgaactcaggtggactgcagggagtcagggcagaaaagcaccaactctgaggggtggagtccaggattcgggaacctcactgtgtgcccagcgatgttaggcctcgtggacacataaaatggtaaaagctagtatttgttgggcacacactatttgccaagctttggtgctaagcacataagtttattatctcatttaatccccataacaaccctacgaagttgatagcattattattcctattttataggcagaggaactgaggcagagtgcctcaggggcttataatttgttggggagtcaagaacacaggttaatacccccaagggagaagagaacaaaatctgagctgtttctcaccatcccaagtggccctgtcctcagttttgcatcactgtctgcctcagtttccccagatttccagctaccaccatggtggctgagctcaaaaggcagcctccaatcactgttctagggatggacatgctcattttcccaaagttcagccaaggcagaatttgtcaaaataagtttatctaggaaacgtagaagaggatggaacaaaataatataaaaagcaaatgctctgggaagagagcagcttatgaggcagttttcatgtcccaagatgaggaaaataataatagctattggtgtgccaagtatcagacactgtgctatgctcttgattatgttattttgtttaatcctcaaggggactgaagtattacacaagcattattgtcctcatttcacaaataagggaacagatgttcagagaggttaagcaacttgtccaggtcacatagcttgtaaggaatagagagctaggagtcaagcttgcctttgcttttaacaatttaaataaaggagacaggcatggtgagtacaaccagctgacaaccagacaggcctcttgcttccaggccccatttaggtctaatggagagatttgactgaacaacctagatcctaaatggcaggttttcaggatagctctgctgatcctccatctgacagattttcagatcttgctcaggaaataatcagaacacttttcctactggacaagtctggaaaaaaccttggcaaatctgtaccctccagttctcctagtccccatttacacagcccaaaacaaaacaaacaaacaaaacccaaaacaccccaataaattaaaaccctgtatttgcacttgcacttcatttcaaatgaagtacacgcctcatggccaggcacagtggctcaggcctataatcccagcactttgggaggctgaggtgggtggatcacgaggtcaggagtccaagaccagcctggccaagatggtgaaaccccgtctctactaaaaatacaaaaaaatgtagccgggtgtggtggtgggcacttgtaatcccagctacccgggaggctgaggcagagaactgcttgaacccaggaggcggaggttgcagtgagctgagattgcaccactaaattccagcctgggcaacaaagtgagactttgtctcaaaaaacaaacaaaaaaccaaaacaaaacaacaacaacaacaaacaaacagaaaaaataccaaattaccctcataacatgctacaatttccacactatttcactggttaactgatggttcttcaagcccagagataatgtgagtaagcccgtaacccagtgcctggcaagagatgcgttgttgctgcaattatcattaagagacctcttcctgtgttcacatcagcaagtcatccctgatacccttggaataaagcagtatgaaattaagtactaattgaatggttgatatcaatagctattgataagtaatatttattaagcagctactgcatgccagattttagtctatatagctttacacgcattatctcttttaatctttataacaaccccatgagataggaattattgttactccctctgttttaaagacaatgaaactaaggcctggaagtactaaataatttgcttatggtcacacaacacccagatggcgggagtgggatttgaacccagacagctaagttcagaacctgcaccagtaacctctttcctctcctgcctcccgtgatgggtttgacaataggatacagagggtcaaagaaagaagatgtccttgtgtgctgggggagttgggggaagcttcctggagggaatgggctctactggacttgaaagaaggacaagagaagtgaagcaaaacagacatcaattttaggctggaagatgatcctgaagtctcatgggacccaaaaatgggacatcaggagagctctcatctttggaacatgagggattgcttatcctctgaagcagtgtcatttggccaacttgtcagtccaaggaaggactcagagcttatcaggaacctgtggggtctgcactgggtctgtagcatcaaaatagaggaggaggacagcaacagatctcctgggaggccctggggatagggccaggattagatcaactccctgccatctccatactgatcacaggatttgcttagaggaagttgtgtttggtttgctgtgaccatggcagggttgccccagcaggtatggatgcagaggggctcaaggacccacaagtctgtaggagttcacagaaatcttagagagaagcttcaacttcacttaagccacaaaaatattgggggctggggaagaattaaattccaggctaggtaggctcccagctgacaccatgttagagtcttcccgcccaccacccgccaaaggcatgtctgggagggccaaatgagacatacctggcacgtggcaagtgcccttaaaggttcagcaactggctgggcgtggtggctcacacctgtaatcccagcactttgggaggctgaggcaggcacatcacctgaggttacctgagtttgagaccagcctggccaacataatgaaaccccgtctttactaaaaatacaaaatttagctgggtgtggtggtgcatgcctgtaataccagctgcttggtgggaggctgaggtgggaaaatcacttgaattcgggaggtagaggttgcagtgaaccgagattgcaccactgcactccagcctgggcgacagagcaagactctgccaaaaaaaaaaaaaaaaaaaaaaaaaaagattcagcaaccttctccaggccccatctttcagagctcacttgcttggctgtggattacaaatctgtcaaccagactcccagatgccacctgctacctgtttgtgaacacgcacatcttcctgcacagtcccctgtgtgaatatgtgttacaaacctttccaggaagcagagttaaactgagaagattctatctgttcgggtcccagcggcccacagtatggcctccctggacttaaagtctagaatgactttgcatggattgagatgctatgagggtggagtgttatgagagcttgccaagctgagactggctggggaggggacatcacaggtactcttaggaggcctgagaatccgaacaaaacggtatcactaggcagaatgtggccgaagctactagttgggtgctgagcatagttcggcaattttgtgagcatatttgtaagaacatatatgtttatcagtagaaataatgcactgtctgggttgactggctctgtttgtgtacattcttggatcccagagagccctggggagcaatacatcacacaagcatttctcgcctgagagctggtcagagggatcattccagggaaagctgggctggtgttgaccagctgaggtctgagagagaacatgtgtgcaccccaaggccaggcctggctctcataagcactggtggaatttctgagtgcatcagttactctgcacctgtccctttacacttagccccagcctggcctggcccggcccagcaagtctgcagccagaggtagcctggaaagaactggccaacgctttcgagaaccaggctgaggccagaaggcacgcaaagcctgaaggattcctctctgctcaggatcccatgtgagaagtctggggctcctgtcacgtatgttctcagctgtcaccgcacagctcactttcttttatcatggccacgtgtgtgcatgttttgctctcctactgcacttcaagccattgttactcaatgtgtggtccgtgggcccatagcatcagcgtcaaccaggagcttgttagaaacacagaatctcggggcccatcacagacatatcagatcacaatctgtatattaacaagaaccccagtgatttgaatgcacattaaagtttgagaaacactgctacttgaaagcaggagtgaaccttgtcacggtgatctttgtacaactaagcttttgtatcccagatgcttggtggtaattaggtgctcaataaatacatgttttaacatttcattttgaaataattatagacttagagaagagttgcaaaaatagtacagtgatgtatgtgaaccactaatactaacagcttacataaccagagtacaattaccaaattaacatgggaaattaacataggtatcattaaccaaactacagggccttttctaatttcctctgttttccccatgtcccttttctgctctcagattgctcagggtatttagttgttgggtctccttagtctcctctaatctatggcagctctctagtctatccttgtctttcatgaccttgactcttttaatgagtacccctcagttattttgtagtctatctttcaacttgggtatgtctgctgtcttcttgtgattagattgaggttatacacagaatagaggtgatgctgtgacctcaaggcatcgtctcaggggatacgtaatgtcaacacatcttattcctggtgatgttaatcttgatctcttagttaagctcatatatgccggatttctccactgtttctccactctaaaattactactatacttccctctttagttaataagtatattggggaagataatttgagactgtgcaaatatcctgattctcccactgatttgagtggccatcactggtggatcttatcaacaactttgtttttgtttttgatttttgttcctggccgacaattattactattgtgtctgcatagtggtgattctgtatttccctcctttcttctatatttattaattgaaattcttctgccaagaagagttgttacttcttccccatttttttaattcaattgcttatttcagtaggggctctcgggtatttattgtatcccaggggttataattcaatgttatcattattttatgttcttgcttaaaccgttccagccactgggagctcctacaagttggctgttgtgtcctttcaacatgcccatctttttccgagtacttccttattccctggtaccacaagatgtttcagactcatcttgttccatatagtttgaatgaatgaatgggagaatgaaaaaataggctgtatgtataaactcagccttcctgtgattccccaactaagaagctgtatttaattcaattctcagctgggaggaagaacgcatgttcagatgccccatagaatcactcacctccagctggacatggtggctcacacctgtaatcccagcagtttgagaggctgaggctggtggatcacctgaggtcaggagttcaagaccggccttgccaacatagtgaaaccccatctctactaaaaataaataaataaataaataaataaataaataaataaataaatagctgggtgtggtggcacgcacctgtagtcccagctactcaggaggctgaggcaggagaatcgcttgagccctggaggcggaggttgcagtgagccaagatcatgccattgcactccaacccaggcgacagagcaagaccctgtatttaaaaaataataacaaacaaaaagcaacagaatcactcacctccactgttctgtgagcctcgagtaaagctggagaaacttttaacctaaagacaaaggaaactgtatccgtggaaactgtaggctggaaaattggcttgccctgaaagtccgactcatggacttggcacatctaccaagcagtatgagatagtgcttaagagtggctgtgctggagccagatgccttggtctaaatccttatagccacttactgtgtaaccacctcatgcctcagtttccccatcagtaaagtgcaggtgataatgacagtcctggccatggatttgtgtaattactgagtttacatatacagattgcttagaacagcccgtgatacatgtaaacatttaataaccattagttaggagtctgatatttccagcaattagctcatcctgctaaattcattcagcaattgcttattaagcatctacatcatagtacacactgttgcgagtcctgggatctcagcagtgaacgaaagtgacatcactgctctcacagagcatacattcttctggaataaaaataatctaaccaaataacagactacactacttttttttttttttttgagatggagtctcactctgttgcccaggatggagtgcagtggtgccatcttggctcactgcaagctctacctcctgggttcacaccattctcctgcctcagcctcccaagtagctgggactacatgtgcccgccaccatgcccagctaattttttttttgtatttttagtagagaaggggtttcaccatgttagccaggatggtctcaatctcctgacctcatgatccgcccgcctcagcctcccaaagtgctgggattacaggcgtgagccaatgtgcccggccacagactacactactttttaagacagtagagggggacaggaacagctgcatttttgtcatctagcaaaaccattcacccctcttgacataagtatccattttcctctgtagacccacaccctggtatcatgtgattcatgcgttggtcaatcaaataactgtattgccctagccacagtgattggttcaggcaaggacacaagacctaatcagcactagagagaattttgcagctggggcttttcatggtaaaaccagtgagctaagagcttgcggcttgagaataaagccaacacccctgaaggcagagccgggagtggaggggaaagtcctgatgggttgtacaagcccctgaatcaagaatgggccgaagttcatcccaggcttgacttctcagttacacgagacagtcaattcccttctactacttgttactgagagagttctgagcttacttcaatccctcagaaagctgacagctgagcaggaagcaggagcttgtcctgattcccccactgtgcctgtgtcctgagcccctggtcttgctctagtacttctcagtttcctgccttcccctaacatacacaccaccaccaccccactgcccacctcgggccacccccttacttcctctcaaggagattcctgccccgtcctccacagagctggagcctctccctcttgctcacctggcttccctcccatattcttctgcccaagcctcttcttcccaggcaagtctggctgaatccccagctctgtttcgcctcgtggtctggcctcctcctctccagaggcctgaggggctgatgcgtggtttcagatggccagcagaatgctacccccaacctcaggagtcccaccgaagctcacactgcggagggtcccctttttattacctaatctcctgcctctcatgtcttcctgtaactccaggcctgagcggcttcagggcagaatcaaggatgttcgagttctcccacctctatgttctgttagagagccatgtcctcagagcagacggggagacaccaaactcccacttcctttgggaagatttccatttctcttttccaaaatcctagggaatgtactgcgtaagccccttaattatacattgactcacgacgttgcttgtgctgttctctcccctcaagctatctttcattcactagaagatttgcctcttatttgctgtaagcctagcacagtgctcaataaacactgaatgaagaaatgagtggttgaataaatgaattattgaatgggtgctgaaaatagtaagtgaatgaataaataaatgaatagactaatgaggagaggcagtgaaaggcctgggacggagtggcagaagggtcaaaaaaaccctggaggggataggtcctgagcccagggaagggaagatggggcactcaccatggcagaatggcaggagggagacagatgttgtcaagtctctaagccttgtgtttacataaaaaactggagtttgggcctgggttgttttatcgaacccatttattagctttttaaaactttttttaaaaacacatggccgggtgcggtggctcacgcctgtaatcccagcactttgggaggccaaggggggcgtggatcacttgaggtcaggagtttgagaccagcctggccaagatagtaaaaccccatctctaccaaaaatataaaaaattacccgggtatggtggcacgtgcctgtaatcccggctactcggcaggctgaggcagaagaattgcttgaacccaggaggtagaggttgcagtgagccgagatcatgccactgcactccagcctgggtgacagagcgagactcagtctaagaaaaaaaaaaaaacataaacataaaaaaaacatacaaacgccattttcaaggccattgcacatcttgcaatgacatggccggttgtggctctgcctcagcaccccacttcccagatacagaaaggaccaattggccatgccgacagcacgccaggtgcagcctcgggggaaggacctgggagatccagtggacttggggtgcctcccaaagcccttcagcaaggactcaagttctctgcaggtcacaggcagagggcctctttcttcccccccgactcccttctccttcctctgccattgactctccatcctgaatccacactggcactgccgggagccctgtggggcctcaggcaacccaagagagctgaagatgactccatggatttgcagctacaaatgaaaaaccacggtttgttttgaatggattgtggctctggcgagaaagccttgggatataaatccgccatgagtggggatgcagatgggaagcagatgtggggatgttgaaagcccccgctccagcacctaaggcccaccttggagaacacatgccttccactgaaaaatgcagatgggtgaggcagctcagacactgtgggagccccagctaagagcccagtctgctcagctgtcaccttctccttcttccccctccctctaggcaatgaagcactccttctgcattcttggaggatatgcctcctctccctgcctccctctccctctgtcttcataccactgcctgtcttactgtctcttgctctcaggcgttctctgactccatgtctgtccttggtctgtgcctctccctccctccctcttcctggctgctgcccaaggccagtgcccctacccttcatgcttggataagtctgccaatcagcttgaacccctggggtgaagaacgggaagaacagtccaagggcagacggcagccccagtttcatgaaggaaggcgatttcaagccagagacgcctgggcaggatgaggccaagaactgctcacttacccacagggctggatatttagtttgagttggggagggcaggtggcaaccagcctggagctcccaagcctgcaagagcagctctgccccagcccctacccagctttaggtttcattcagtgtggccttctctccttcctggcctggagccagccctctccagcaccaggaagaggcagcacagctgggtaccatggtcacaattacccccaaggacacgggcccaggtgaaggctaggcaggacaggatggagcatgttttgtatcctccactgctctccagagagctaggagcagcccttccctttcaacccctgcagggccccagacagcctccaaaggcaaatgtgctttttctttggcttgtatacagtctaaatactttatccaattgatacgggctctatatccagttgtcttattttcctttttgggtctgtccacagctctctgagctctcaggcaggattttgggaccatttgtggcacattccagaggccactagcaatctcacaaattaattctaaacttgtacacaggctgtgaatgctatacaacttttaggggggacttgagggacacaccaaaaaccatccaaaaatagaatgttgccattcccaggagactggaatcatttagaggacaatttcacaaacgcttctgccgatatggaggaggctgctgtcggaatgcagctgggacccatctccctggcactctcgagtctctgcttaggggctttcccttcccagcaggcactcattccaggatccacaggcaccttgcggtccccagcactgggcggcactgagggggtatcactgtggcaccataccgtaaggcatgatcccaggaggcttggcatttagtgtggaggctaagctcttggttctaggttcctttatgcattgagcatctttttcacacatgcctgaggctgtgttaggcagtgagtgtgaatggcgaacaaaccagacagggagcctctgctcgtgcaagaaacaaacagggtgctgagacctggaataactttcaggaagactgaagagagcagcttgcagctgagggagatctcaggcaggtctcagcagctgcctctgggcttcagtttcttcacccataaaatgggggtgctaacagcgctactttgaggattcaatgagataatcaatacaggataactcctagtcataacaagccactaatgaggaccatacaaccaaagcagttaggagcagacagggcaggaggatagcagacgcagtcagcactctgcccccatgtcttccgatccccgtatcacttcaggacacatggttcactcccaacagcccacacctgcctgtttgtcagcgggctgccctcaggctgttggaacctgctctggccacctgcatggagggcaggccagtgccggggaggtttcgtccctgagcccctacaggcagcccctgaccagtgactctgagtgtggaggtagaaatatctcctccatctccagagctcttgcagactgagccacttacccttcgtggccttttgcttgacattgtatccttgcttggcctcctcttttcagtccccttcccctactcctgggaagatttgggaaaaaatcaccactttcacacaaacccttgtttgctgggtctgcttttggggaaaacatcttaagacactgggaaatgctaaacattaggaggtgtctcctaagctgtgtgaccctgtcttcctgcagagctgcccttgggccaaggcaagtcctcccaagtttctaaggaattagtcacaacaagatagccttctaactcaggaaatctgtgctccttgtatttgaacatggcaaaggccagcaccataggaaccctggatggcccctggcatgtagttctcggctctcaactcaggaaactgtctgagctgctgccttcgggactgtgtactccctccaggaacctgcacagggaggccaaaaaaagggcataaaattcatatttcattattgttattcttctctattcctggaaactccagtcatcctgaagatgattctttagcgtctctcttcccatgaaatggtggactggtgaggcaggcacacaggcggccaacagggcacatccaagatgcaggtctggattatttgtctagactttatgatgtttgtggtatttgccagctttttaagttttaggatttgttgtgatttttttttcttatttcaaaattttccttcatatttaattttgtattcttttttttttttaaagggatcccaaaattatgtaagctttaggcaacagaagacctcggtaggttttgagcatctgaggactgagaggctttttcacagactagcttctagctccatacttttctttttaatatacagggtctcactctgtcacccaggctggagtgcagtggcacaagcacggctcactgcagcctcaacctcccaagctcaggtgacaggtgatcctcccacctcagcctcatgagtagctgggattacaggcgcctgccaccatgcccgtctaatttttgtattttttgtaaagacagggtttcaccatgttgcccaggctggtctcgaactcctgggctcaagtgatctgcccacctcatcctcccaaagtgctgggattataggcgggagccaccacaccccacctggctccatacatttcaactcttgtttttcctctcctgtcttcatacttctggtcccaatgtgacagctgctgatcctgcacctgccactgtgtcaggtgaatcagcacagtgtatggtggaattatttctacaagccatttataatcaggacagttagcaataaatatactacatgacatacacatattacatacaacccaacggagtgttttcccaacataaccaaatgaatatattacagaaggcccaactgagtatattcccaactcaaattcctttagtcatactcccaaatgccacagccacctcaccacagcctgacatgaagggaggtgtgacagataagaaatcagggtggagactgactacagttaaatttttttgggaggagacagggtcttgctatgttgcccaggctggagtgtggtggctattcacaggtgtgatcatagtgcactactctctcaaactcctgggctcaattgatccacctgcctcagcctcccaagtgctgagactacaggtgcataccaccacacctagctatagttttttggttttttttgtttgtttgttgtttttaccttagcaaatactatgactttgaaaaaaaatatgaccttggaaggaactcctgtaggtgagcggccctcaatgtaagcctcattagcttctcaggaaactggcctctggtagctggacttgctgtgaggcttgggcacataatattttaaggtctgtaagttttagccacatcctgggtgtgtgtgtaagggaggagggtggctcagaattgttctgggctcttcatttcctcagtgcccttcaactctgaatccatgtcaggaagaccctggcaagactgaggagggagagcaaatggtaactatggccataactgacagtgagtttggcccctgaggttggacttagtagcaggagacatcagtattccaaaagcccaatcactcctcttcttttgcattttcctttagtttagtcctttaattttttaaaccaaagtttcttctgaaaaaattcttggtttgtctttgctgaatggaagagcaaaggaatttagctatacccaggtcaggccaaggtcagtaccagtggacgtgggagaggcaatgttggaattaagaggatgttttgtgatttacaaaacactattcacatccattgtctcatttaagctttacgtgccctctgtcgggtacacttgtacgttgttagaatcactatttcccagttaaagttaagagcgactaagcaatttatgcagagtatacacctaggcagtggcaagtcagaaatttgaacccagatcttccaaattcaaatccacaacataaccaaagacaactgtggatagtggtttactattgctaactactaatttttttttttacacttagtgtcagacacagtaccggcacttttcatgagttctcttatttaatcctcatatcctctggcacgagccaggtttgaaggatggggaggtagcagggaggaaggacgggatgggcctcattccttgcagagtgcacagaacaagtaaaggaacaaaggcaggaacgagctgagatggttcagaccacgttcactgagagctggtggtgcttcacagccaccgtccttgggcctctggcctggtcaggtaagcctcctagaacctttcatcttagtaaaaatgggctgtgcccatggaaagtggcctctggctcagccctggaagcaacagctggaagaggcctgtggcctgtcactatccacacggttgcttctctgcaagacagaggcccgccacggtgagctggtctgtccaaccagctcctgagttgccagtcaaatgatgggctcggcctcagcgctcagctttgaagtttaatggggatcctggtagcccacaggtcttggccagatcttgccctttagtaagtgtcttcttccacttcccatcaggggcctggagcctggccaactccctgaggcatctctcccagcttatttggattgagggatggagggtgcctcctgccctggagagggaggtggagaatggaacccgtaccctgattgggaaacagaaacctcaggaggcaccaggcagcaggactggacaaagaagtgccggccagactggctccctggggtcccagaagtcacagacctacacaatgtctccctgggttagaggatgaacagaacactagcaactctcttaccagtgttctccagacttgtctgtcctgcccctaactccacctcctttgggcttgtgtgagaaaacgtgtcagagccaatttgacacctacatccatccactggacatgtaatcctgcgcaacttacttctctgtacttcagtttcctcatctgtaaaatgggaataatgattgtcttcagcttatagaatgatgtgaatattaaatgaattaacacagacaaagtgcttagaatagggcctggcacagagtaagcatgtattagatgttggctgctattattattattattacaagagttctgagattactcccttaggccccagtattttcctctggggtgttttttgtcactttctgtcacttaaaatggattgagattttagggcaaacactggagaagcttctcaattcctcctaatgggcctgctgagggtgccgtggctgactgtgggcaccggcttgctgctcctctcctggccgcctccagttccaggctgcttttgctgctctgcctcactggtctgttcggagtatccacagctgctagctggagaagcggtgttaatacctcattagcaccttcggctgctccttgtgggcactaatcacttcagtttgctgcctctggagtgactctgtgctgcctttgaaaagcaggccatgtgatggcgcagagacttctccagctggtcccaattccctccctcagattgttacttttacccaggaagtgaaacaacttactgtttacattttgtatacacacacacacacaaatataaaattttttaatagatcaaatccttactccttcatcaggacctgaaactaaacctgtaagcagcttcttccagagccttcctcttcttccccagtccacacctgcagacctgcccctcacccgtgccacccgcggtttgtacaggaatcagacaagaaggcaagggcccgaattggaagcagatgtttgggacgatgagtgaggttggggtggagacaataggaaggacgtagaccctgctagagctgcttgttgctctgacataccgccaaggctcagaaaaatagagtgactgttcctggttaaatacccagctgttactcgtgccaaactttcctgggcctcaatcctcagagtctctggctctgcttccaaagttctccatatcctcatgccaaccactatcttggccccttcttcccaccatgccaagcccccaagaccagccatacccctaaaagtcaggactggagttttactcaccccgccccacaaagctaacccacgatgccatttttttgaagcctaaactcaagatatggtctgacaaaagaggttttgctgattctgggtgtgagagtctactggaagacatggcttggacgccaagaccacagagttttcaaggtttagagggatgataggtcagaattgttaaaccagaccactgcggagtatgcagatgggtggctgttgactgcacccactttagaacatctccagagctgcacatgagcctgccaggagccaacagcacatttgtctaccctgactgtgacataaaatgctagatctataggagaacacccaagtttaattccattgttttgatttttcaaggagacacaagttggcatcatcatgaacaaggtttcagagaaatcccattggaaagagaggctaaataactggttttctaaaggcgatggcctgacccaacccctatccagagctgtgatcccagtcagaagcttaggacatcaactttaagatctgcccaatccccaggaggaatagatgtcagctgctgtatacgacagagagataaccagggactctagtttcctggtttaatattaagggaaattccactgaagctcagtgtttccacccatagtggtcacaaccaaccaatttcatgggtgttcataaaattgatttgccttttcacgcctctgagtttattggaaatggtattcctttgactttcctctgccacactgattataaccatagcacaaaccctttgattgctattagtgttggagatacctccctctccccatccactcaagattctaatttcattcactgagctgcaggctattggccagttccctattgccaaagtcaacacttccggtctgctttgtctgggagagcagattaaagggagagtgggccctaagattaccgagtcccctttcccaggctgtcccaggacctgcccaagtgatggcctatttatggcacaataatgcgcttgctccttgggtctcttggtttggaatctatctttacaagggttctttcttctctgaaaatcaacagggagagagtaacttccctctctgtaggaagctagactaatttcacttgtagcaacagcaactctataatatagaaagtctccaaatacataaagaaatgctccccaccaagtaaacaggagaaactattgaagggggggacagtggtgatgggtttgggtgcccaagcttcaggagaaggaaactctaaggaaaatagattgtttatatctgtctcccaagattgtaagcttctcagaggccaggatcacattctaccttgtgtgtccctagctccccgcacagtgcttgatacataggaaacgtctgctgaaatgcagagctgcacagaactcaagaaaaaaaaagggaggctacaaacccagggatggaacagaaatacctgactgggaggggaggaggttaggaaatgaaatgacaacttagagcaggattggacgtaggagaccaagcacaaaatgatgacacacacataatcttcctcttgcacaataacacaacattttgttttcaacataacataaaagccatcaaaggctctctagctggcttgcaaatactctgatatccctgactctgctaatgggcaaacagaggaatgtcttggcaactccctcaagtgggagttctgaggagagaggaaacattgttggtctgtagaagaagggaagattcagaaaaactcctttatgtgcaaatccataatgcaggtgaagtggggggttgcagaaagagcgacttcactcaagagagttacagaaaccccctcaccctggaaaagatactatgcttatggtttcaacagaatagtttcatagtatcttcacagtcttgtttagggtgtgtgttgtctccctttaactctggcattcttgaaaatgtttgcttcctcagtgagatatccaccaggaatttggcctttgccaaatggtgctatttcatatgagcagagtttagagacaaaagatttattccaataagtctttttctgcagacttaattaccagagataaacatcagggtattatgtaacatatctgacctcattatttcatttgatacctattgagtttccaccaaagcaaggatactaaaatttcagggcctttttcctcagttatatcctcaagggtgtcttgtattctttatatagaattcacttaaacttggaagtcactttgctcattagttggtagtctaaggaactttctacatgcaaaagattctaaagccattactaatagctgtatctcttaaaatctctctaccctgcatgagtagggccttttcccataaatcccaaatccccaagtgactgataggtaagccaaggtataaagtgttaatctgtcacacacagcatcaccaagtgaacaaggcagagtcagcgagcacagtggcccagtgcctgggctgtttcttagtctaaactaatctgctagagacaaaccagaaatgtggagtttgggcttcgacacgaaacagacccatgttcaaatacagctctaccacttgccagctaagaaaccttggcagttacttatcctctgtgtgcctcaactgtgttttgtgtaaaatggagaaaacaagacataccttgcagggttgttgtgaatgagacaataaatactaaagctcctagcatatgggaagagctaaaaaaaaaaaaaaaaaatggtagctattatcatgattcagtaatcaggtgaattaaaggaagtcaaggttcctaccacatgacataggattgagatacagctccctcaaatacctcttccgtccttacaggatcatgcaaaggaggaagtctcttctgacttggtgtcttcttcatgaatgtttgggccaggtgtcttgagtactcattctctctggcctgcctggacacggcaaggtgaaaaacagagtcaccaccccctgggaatttccacaccagtcatcgactctagcattctcaactgcccccagacccatacagcctcctgctacagaaactaccagggccctaagtcacagtcagcatggtaacacacatactatatataggaaaacttttttcccaagaactcttaagttattagtcgattttcttaattggttaatagcatcattttgcaggtcaggaaactgatactgaaagaaggttgtcttgcccaaagttgaaccacgggagttaaaaataaaaatatgaacatttggctgggccccatggctcatgcttgtgatcccagcactttgggaggccgaggcaggcggaatacctgaggtcaggagttcaagaccagtctggccaacatggtgaaaccccgtctctactaaaaacacaaaaattagccagacatggtggcacacacctgttattcgggaggctgaggcaggagaatagcttgaacctgggaggtgaaggttacggtgagctctgagatcatcccactgcactcgagcctgggtgaccaagtgagactctgtctcaaaaaaaacaaacaacaaaacaaaaaaacaaaaaaaattcaagcccatcaattcatggttttctatcctttgagggtcccattttgcaaacttgatgcaaacgtgtccaacggtaccttcttcgagaaaacacccagtgacacgagatgcctatcctgcaaggagtgctggaggcccagggcccctagagtcagaaacataggatacaagtaaattcctgtcaacaggatggaccatctggtagaggacataatgaggtttataaagaagcctcctctcctacctccaagactgacttcttcctagagtcatacctaaaagatgaactcctaaaacctcacttggaaatttgcctggtttgccaggtgaacctggtctcaggcattcacagccatcacagactacaaaagccatggtggcctgcttattattgggtattccagggaaatagcaacacaggcctcatctggataaactatccatcatctccctgaagggaggctacaaggggaactagatggggagtcccactctgttcttgcaaggtgactggatgctatgattctgtgctggtgtgtctgatccctatccctagaggtaccaacattgccactatcccatggttaagaagctgctgctggctagtattgacaagtcagggctatatcgacagcctgaacaactgtgctaaagccacctctgataccatattgaaaaacctacaggtatcattccttgacttctggaaagagactgtgttctccacatctccttccaggaattaactgcccatcttatagagaccacacctgaattcactccagagaaccaggtccctgctgtggctatcataaaatgtccttaaatgagcaaaattaaagcaaactaaatccgggaggggaaaaaagggatatttataacaaggtatatctgaactctaggcagcaccactctattggatacaaaccaaggtcaacatgacctgcagatctctaaatccaccctcctgtactccaaataaaagctaaaaaacaaaaacaaaaaaaactaagctcaccaataactttgggatagctgttaggtggtgtgcagactcagtattctgagttagaaatactagcctattccacaatttttgagacattttagtgctgagtcatttttaatactactacacatacatgatactcaagaatttcctgctgaccagcctacaaaaactgcttagggtttagggtataaaaacaaaggagatccaatttggagtatctggaggaaaaatctttacagaaataagatactttatagtcttagaataattaatcagattcagcatcaggaatccagactagattctcacagggcaattatggcctcagaagacttttcaaaccaattatgaggtctagaaattactatggagaaactgaccttggttagcttcttatcatgacacacgtgggctctttttgcccctctccactttttttttttttttttttttgagacacagtcttgctctgtcgtccaagctagagtgcagtggcgcgatctcggctcactgaaagctccacctcctgggttcacgccattctcctgcctcagcctcccgagtagctgggactacagatgcccgccaccacgcccatttaattttttgtatttttagtacagatggggtttcaccgtgttacccaggatggtcttgatctcctgacctcatcatccgcccgcctcggcctcccaaagtgctgggattacaggcgtgagccaccgcacccagccgcccctccccactattaacgtgaggacaggctgtttgaaaaggggcctggtgaaataatgatcataagtcaggacagtagttacctttagtgggatgggacgagagtgtgctctgcagtgctgcaatgttttatttcttgacctggatggtggctatttgtgcatttcctattactcataagttacacatgttaataccttttttatacatactgtgtctcaaaataaaagaaaaaaggaattttagtatcctgtaatacttttactattccacattatctggaactggtttattatgcttgaaggtctatgtgaagccagagtagagggaaggagcccttagggttcaagccacttgctggagaacctcgctgtggtcctgacagcgaaaactggggctggagagaggtttcaaagctctatctacaatagctcagaggcaatagtatacaagaagctgaagctagtatttatggagtcataagaatgacttgataggctaaaatcactcattggatcaatgttcatagtgacctattcaaagccacaacagcaagtgtataagatacaaataaccttaaaatgtacagttagaaggacagaattttaagaccttttttgtttttaagagacagtgtcttagccaggcacggtggctcatgctaatcccagcacttttagaggtgggtggatcacttgagcccaggagttcaagatcagcctgggaaacatgccaaaaccccaccttttcaaaaaaaaagagaaagagagacagtgtctcgctctgtcacccaggctagagcacagtgacacaggcatagctcactgcagcctcgaactcctgggttcaagtgaccctcctgccttgcagtgttccaaagtactgggattatacatatgagtcactgtgcctggccctttaagatatctcatatcactcaggagcttgatgaggtaagaggagaatgcactgtttggggtgggggcaaggatctgttttgttttgtttttaaattcaaaagggaatttttttaacattttccagattgggaaccaatatacaagacatcataattactttcccaagaaagtcagggtccttaatactactccttctaggcccaaatcagaggtctgttttttttcttctcttccaagcttacctttgtaagctgaaaagaatcggtaagacttgccgccaacaaacttcttaggagcagtatttttgtttgccactcccaaaccccttgtgggtgagggagatgttgggagacaaatgtgtgcttaaatatgaaaatcaaaaggctatttatcaaagtgttaacggtgattacctctggatagcaacttacctatttcccttgttctttttcttatttccaaattttctatattgaatttctaggtagtaaaacaacaatgaattattgtttaaagactgattaaccggttccttcttcagaaactgagcataaacacttgtcctcgtctccccatggctgagacagtggccctgcctggcaccatggacagcaatcagggaagggtgaaagggcaagagtgggacaggccaggactccaggtgtacactctaccccgagccgaccacttcaggaggaattcctggggaaatgcaaaatcatttccaaatcttttccttccccaccttccagtcaagccatgaatctccatttaaagcagccactcactccttagttcttttaaacatttatttatctactgtacaaaatatttacatcatcagctgcaactgcctggccctttcacctggcctgacgaatctgcagcagggcttggtctctgccaattttccagaaacatgctgacactctcctaggtattcactcatgtctggtctccttcaaagacgctaaaaggccagaagggtagctggccccccaagtacctgggtcacaaggacataaataaaagaactggccaaaataagaaacactaatagaaaattgcccaagaaataacactctctcatctctttgacatattgtaccttttccccacactggctagtatgaaagcaggattagaaaaaaaaaaaacaaaacagtaaaagaaaaggcccaagagagcaaagatacttttgaatagagttcagacagagaatagaaaaccacaatagtgccaaagggttttgtttaacaaagactggtgcctaaggaccaccacagggatgcagcttccctggttgggttgcaatggtgcctaagatgctctgaaaaagtgctatgactagagcttaaaatgacaggtctagccaagacaatcaactcaatctccaggatcagtctctggaaggctgccggaggggagaattcagaaaagcgactgccaaaaacagcagaaccagtccacgtgcccccagctggaaacccctttctgggcccaaggggcagcattatgtttcccagggtggtgataaaccttccggtacatatcccatgggaaaacatttgggcaagcagcagcaccttgtcctggtccctgaggagagcagtgaccatgtggcatggaggatcctggggtatagagaccctgatgctggatcccggaccccaaggatgagtgaggtcagcacccatgtgccaagaaaggacaaatgatgactgcgaaagactgaggtcaggcaggaactgtagcagctcaggagggcttgttcctcatgatccctgcgaacaggagggctcagacatgcttccaggaggccaaggcattgccaaagtcctgccttgtttcaggactctgtgtacttgctggttttggcaataaagatggcttgtaatattctcagagttgactgccccattgggaatggtagcttgcagcaaagccttcttaaaaacacaaatttgggaagtcaatgagattttgaatcttgaaattattttcaatcaaacagtaatgaaaaaggatgttgtcatcttccaagatacagcagcaggtactcttcaatcatcattcaacagtgaacctaataagcttcctccctccttagttctccttcctgataactgatggagcaaaggggagtacaggggttggcaggtgtttactgtgtaacatatcacctccatgttcatccctagtgtcctgacgccaaggacctgtgataagcacgtaaactcctagtccctgttcctttgtcttagtgctgccagagaacaccaagcagagagagaatcagggattgctggcatactattcttactgttctaatcttttgctacaaaattttcttcagtagaatgctaaaggatccccagcttttagcagactacataatggggaagtcagtggcccaagccggccatacttcagtgccaataacaaactcagggaaaagcatcagtagtctccaagccagccatatgcctaggcatgccccactctggaggctacagctcagctatccttcatattcttcagtctatctgcttttctcactggctacaattcaagaaaaagcttacagagttcttctttgtggattaataatcatttccagaaatgcccgaagggaaagtgctttttccagttctgacaccacaaaaaaatattctttttagcagtccttagaggcagtccagtgccatggcctatgcctaccattgtgcagcgggactgctcctatgggccacctcctatctgtccccctctctcctggctcctgatgagaagaggcaatcaccccacccatgagaaggactcaagtaccagtctggtcaagtagtgagggccaaagagggtgtctccaaggagtatcagcagagggagttttggagcacagtgtggatttaagggtctccacaccagtttcccaacagggctgagccccgtgtgccatctccctcagctactgagatcttcaaaggaccaaataaatgatagcagcatggtcctcttctcatgacagaatgaagagctcagcttacataccatgccaaagtggcctgtggtagatatgggcagggagcaggtgaggtaaagacaaggcttgtaggtgacaaaatcctccagacacaggggagcatgcggcatcttctggctgatggttatgtgtgttaggatcagtggttatgatgtctgtaacttgcgcccagaagctccagagagcatgggagccaactggatgacaggagagtggtcagagcatgccaaagccctcgcaaccctcgctgatggccagctgcagcatcctgtgcacctcttcataggagtcatatgtagggaggcacagctggttaaaactggaagggcaagggagaagtgattaactcataccaccaaaaacactgggcatgcatcaggcgggcagatacctaccatgtgtgtgcagtaggcagcgtgctatgggtcggagcggcaataatctgaaatgagggacagagggcggcaaagcctccaggtggtagctgagaggagcctgttgtgaactgaagtagccgagccaactcctcctgggtcagactggaaaccacagtccaaaaccacctcatgacctggcagggagagcacaaggctgggatcacacacagtaaacaagctaggattagatccctggggaaggaacaagatacactaaagtggggctgtgccccagttaccgttctatgaggacacagggtaggaacagtttgacaagcacttcaagaatttacactgtcacatgattaggagggtagtcactgactgttggttctctttcttcgccatctccaatttactactcctgtggcagtcagcatgacagcccttagggatcagggctcccttctgcctggacaaccacctatctttccccatgcatcatttttttttcccagaaaacatatcaactgctttgactcccctacttttttcttcttttcctttctttttttttttttttttttttttgagaaagagtctcgctctgtcacccaggctgcagtgcagtggcgtgatctcagctcactccacctcctgggttcaagcgattctcctgcctcagcctctcgagtagctgggactacaggcatgtgccaccacacccagctaatttttttttttttttttttgtattgttagtagagtcgggctttcaccatgtggccaggctggtctcaaaactcctgactttgtgatccgcctgcctcagcctcccaaagtgctgggattacaggcatgagccactgcgcccggcctcctctacttttttcttctgaaactttttccttataacatggcacaaatccaactgaaagaagtttggtccatttaccttttctctgaaatgccatgagccaccaacaactactgcatgggctttgaagtcagacacactgatgtctccagtcccacacatcagcagctggaaaaagatggtaaggtgttactatgacagtcagagagacaaagacccaatataaggtcaaaattacctaagttaacaggcaaaatgtagaagaaaacattaccaggaaaaagacagaaggtgaggtcataatgccagaatactgctttaggaaaatcaattacatacaacagggcaatagttgctaaccagtgggtaaaaaaaagattcacatggcttttaaaatatatatttatacaagtgttggtggccctacctgggacctctaaatctgaatctctcggaacaggttatgagcttatacaggaagaaaaaaaattgctcaggtatttctttcttttctttttttttttttttttgagacggagtctcactgtctcggctcactgcaacctccacctctccaccttgcatgctcaagtgattctcctgcctcggcctcctgagtagctgggattacaggcgaggtatttctgatgaacaccctaagaactgctactatggattatttttaaatgaaacaaaggacaaaacacacacacacaaactgtttcctgacagtctgctctaaacttagcctgggaatatcaaggagaaaaggcaagctgtttccccaaaatccccaggcccatttatgaatttgtcaatgacctttcctttttcttaggatgcattcttttgtggattgaacttttactaccttcccttcagcttctgcctctacttgatcagatacatttaaaagtatgccaaaaaatgagaacattaatgacatcagagccttaaacatcttgttaatgtcctaatttggttcaggatccagcatgttacttagcagactgcaagtactcatccaatagctataaagaataatacattctaaccagagacaagaagagcccaaactgagcctgagaagccttggctccttcaaaaagaacttgctaagctgaccaggaactaagagcaggatgtggaacaactgtaagagaccatgtccttcctttctacttacttctacaaattgttacaaatgctttgcttcaaaatgtaacaaaatttaccagtagttattcctcagcccaaaaaataacagtgctaggtaacaggtttatcagaaactttaggctgagctgtggagagttcattttgtttggatttcacatctgaagatataaaacatgaaaattacagaagattttgattcttgttctcaaatctacttcagttaatagaaataagaattgggcaagaccacctaaaattactttttcccccattttaaaagaaaaccttcctccctaaagaaacgtttgcagaaagacactcctcatagaaactacgggaatttataactagtaacttgcactgcaccattttgtactgatgtctcatctgtgagcaacaggccacaacaaattgatgttattctttgcccacacctgatacggacttcagttctgcatagaatggtatttaccatcttagagccattttttagttgttacaggatctgaaataagaatgaatttactatataaataaaaatatatactatatactgttttggtctaatgcttttgaaatatgatctcatcttttggtttgtttccttcacttcattagaatgtagcccatgagggctggaactttgtcttattcgttactctctctgcagtgcctcaggaggcactcaatatatacctgaaaaaataaattctattactcccttaaatgtcataggattttatagacggtacatgatattaacattctttactactcattgatttttttttttttttttttgagacagagtcttactctgttgcccaggctggaatgcagtggtgcgatctcggatcactgcaacttccgcctccggggttcaagtaattctcatgcctcagcttcccaagtagctgggattacaagcgtgcatcaccacacccagctaatttttgtattttcagtagagacggggtttcaccatgttggccaggctggtctcgaactcctgacctcaggtgatccacccacctcaacttcccaaagtgctgggattacagaagtgagccaccatgcccggcctcagtgatacttgatgaataaatgagtattaattattactcttcataaataatgagctacttgctactttcatttatttatcccttaagctaatatctctgcactctttgctactaattttcacattctaattttttaaaggctgaagggtcaatgaatggaggagcgacaaaagtgaaaccacctcttgcataaatggctttccagctgcatctcataagagaaggtacaccaagctggttcctgtaagctacaaaaatgccaagttaagaatgggagtctgaattgcaatcacttacctcaagctcattctcatcaaaaatagccaaaaggttctcagggaccaattcattcaggcctgaaacaaagtaggcaagttaaagtcatacccacaccatggatacaggtattttaacttcaaggccaagaacagacaggatcccaccttttaggaaatgttccacctcctctttcacttgactggccagccgatattgggccagcaaatttaaatagaagattttattcgcattggtgactggagtttgagctccacctgtcatgagttctacaacctgtaacaggcagcaaaagacagacaagggagaggctgtggatggaaatttatgagatgacatctgcctggatgttttatagacacagattactgacctccatcactgtcagtcacaagtttctgctgtgcattcagcttttcaacacacttggtttaatttagttcctaagcttcagggttcctaccactattgctgtatactagctattatttctgaaatgggtgcctgggtaaggtcttctctgactcagtcaagtagtagtgatgcaataggaagatactatggctcctcgctagcaatgttttaatctatgatccaaaatgaaaccactattgacctcttctctaagcaactaagagtaaaatcagataagcagtaaggaagtctttttatgtctcagaaattccaagatgggaacaattgttcccacacattcttttatctctaatgtgagtcaacagaacaagccacagtttgatacttgaagatcctggattctaatctcagccctgatgctagcttgctacagacctttggttaattgcccctccagaccttaggggaaattatttggcctgaactttcctctctgcaaagaaaaaggtgaacaaactgtatgactctcaaacagaattggtatcccccaataaactcctaagggaactttgaaggagccctgaagcacagcttaaaaccatcatccaggaatatttgtgtagagtgaccaaggttgtctccacaggtgaatgaagttacaagatcagattttaagacaacagcatggtagcaatagcatgctactccacagcagggattctcaatggatctaaaaatgtaaaacattttttctgttggtatgcacaatcctggattttttttttaatgtaagcatttctatctaggagactgagaaataaattattaagatttagtattcatattaaacacaattaaaatgagcactaccctgggtctgaggaccctaattcagtgtcctattgactctagctgccttaccatgccagctcaggaagttgggtctaatcccatgtgtacaaaggcagacagctgggaatcccataatttccagaaaggatatctgattatcagtatagtggtaccaatggtcacaatttttcaatcattcctattctgcttttaactttaaatttactgcaactttagcgtcatcattatcatttgatgctgtttaacaccacaatgtaaatagaagcacatgcatcggaaatatctctgggccatcattttctaataaaaagttttggttttattattttgagatagggttttgctgtgtcacccaggctggagtgcagtggtgcaatcacagcttactgcagccttaacctcctgggctcaagcgatgttccagcttcagcgcccacttcctcccacactaccccagtagctaggaccacaggcacacgccaccatacccagctagatttttaaaatctaaaagacagggtcttgccaaagttgcccaggctggtcttgaactcctggtctcaagccatcctcctgcctcagcctcccaaagtgttgcaattacaggccatgagccactgcgcccagccaaaaagtttaaaaatacccaggcattgtgttaaaataggaatcacctacatcactactgcaaatgttgacacagacactgccatctcttccaaatctgcttgtacagtgacacttcaccatcattcagttatttttcaactggaagcaggactcggtgggatagatggagatatgtgtcttttgcttcactcaaatgggctgagatcataaagcataggatgcaatgtcctaaagctgtgctgtccaatacagcagctgctagccaagtgtagttatgtaagtatacattaactaaaatgagaagttcacttattatgtcacccacattttgggtgtttaatagacaacacaaatatggaacatttccaccactgcagaaagttctcttagacagtcctgctctacaggaaactggagaacataggacccagaggctttgtcctctttctcaccttatccaattgacctgatttattatatttctcttctgcaaagaccagctccatctcactcatgtcattgttgaggataaaacaaactttagatttgtagaattctgggtcatctgtttcaaagtactgaggaggcagaaagacacagaacagaacatgaatactcttgccctgaaaggtgtaactgcttagaaccacttatcccttcaaccttaaaaattatttacaagcccaggaggagagatttcagggttaatggccaggggccttagtaggaaatgcacacccaagatgttaccttgtaatgcatacgcagtcctatgatttgggccaggaaagagcgggtgaagcgagctcggaccaactgcttgtaggctcctcctagagaggactcatagagacacttgcccacgagccgtcccgcaaactcatacattttcaggcgcagatgagcggggcgattagggttgggatgcacctgtccaagaaagagactgaaaggccctgggccatttttcttcaagcccagttctggaaggacccttccttccccaaccccatgccaaaggaacaagatgtcactgtgaggatcagagcccatccaaatgttagttttttggtagccaccactgagtaattcaaagtgactagaagataaagggcaaaggtggacataattaagaatcttatattaagtttgtggttaatcagcagatgatgtgatgccttttccctaaaccagaacttctttcagccaaagtgtacttctctactcctgacacctttgtctagacaaagatctagtacaggaatcatttgcttcaggtatgttttgagaaagaggcttaattattataataattagtagagtagacattatactataatgtttttagtcaaatattcagctgcctgcatttttgcttattttacagatgaaataataaaggcaaagaggagaaagacaatctgattagcttatattttaagcagtaaaattaagaataggacacaggttgtcaggttcccagatcagtttcataattttgaatccttgttagtctacccatgataacataatccacattttccacccacccgtcaccaactcactaatgcttggttgttgtcactgaaccgggtgaagagctgattggtggtatcaaatagtgctttgcagattagctcaaaccattcccggcgaggccctccccagtccagagctgaaaagcataatgaaaataaaaaatgactctgccctccctcctcttaccacttttgtttattgagtcatcattttatactctccacattccctctattgtactactctggtgtttctccgttgcgactcatctaaactgtggtcctttagaaatcccacccctttttgtaggattaatggtattctgatcactaaggaaaagccccctagtatggaaacaccagaggtcggagatcccaggaaatggacatttctctcaaggtaaccacggttcaaacacttagaactctctctccaagtccctgtatgtctgtgtaccacaagctcctcaatgccatcctggccagtaaatactaccctttttttcttgactcatggttcccttttccttggggaaaaaaaaacctaggtttttttttttagggagtgagtaggaggtaagagttgcttttttttttttttttttttttttgtggagaaggtgcgagtggggaggagagttcaaaaagatgaatataaaatttcaaaactgaccttcttcatcctggaaaacaacctcaaagttcttgctccaatctgagatggagaaattccgagtggctttcagagactgaaaagaagtgaaaggaagggaattgtcagaacactggctggtgtcctctggatgttaaagacaacacaagagcactgccattgtctgctggactaactacgactgcctgaaggagatatgttactcataaacaagctttaatgataccacctgacatttaaaatgcacataacttcaaatttaaagttttaaaaaataatctgatttgcctttacatcatcactttgttggaaagctgaagttgtttttttcttttccttttgttttaaacaatccttgttttagcaatgaaaacattcttgcataaagaagtaaaaaatgactcaagtcagtaagctgtaggcaaaagaaccaaggaatcctggttttcagcaaagtatgatctatccactagacatatttatccacaaggctaggttcagacagcgagccatgccacacggagaatatggctgagaaaacgggtttccagtcacacctaccagagccaaacatcacaaacactttctggacaggaaccaagccttctcattcctggggaatgtaagaactatgccagtgtctgtgcagtggagacagacacacatcaggtgttccttttccatcagaccaaagtgacaacaaaaatcatttccttttaattcaacaagcgctctattccagggattcaataacaagaagtttcttctgtaatcactatttacacctgccctacatgggagttccaagggacccattcagtagatttgaaggccagtaagtaaactgctcttccctcgataacatacctccaacaaaactgccccaaatttagtagaatcaaatagaagaacagacatatgtaaagagagaaatttaggtttcagaaatttagtatatctgtcttttataagtatatctgtcttttataagtatatctatatctttacttaaacagagaaatttaagtttcatgaaaaagataaccagatcaggcatggtagctcatgcctgtaatcccaacactttgggaggctgaggcgggtgtatcacttgagtccaggagttcgagaccagccggagcaatatggcaaaatcccatctttacaaaaaatacaaaaattagccaggcatggtgacacatacctatagtcccagctatttgggaggctgagttgggaggatcacagcccgggaagatcgaggctgcagtgagccatgatcgcacctctgcaccccagcctgggcaatagagtgagaccctatctcccaaacaaaaacaaaaacaaaaacagtaacctgcagaatatagacattcaattggaaaactttggtatctgctgacagagatgaaattttacctaccgattccaacaaggcatgtctgctgaccttcagggtgactttggaatgtggtcttttcatatgtacctgccgaagctctcgctggaaaaagttcaccttgtcctgaaaggtctcagagcctcctggggaacagcaagatccatcattacagcctcattacaagccatctgtgtagtcctgcctctccaccctcatggatgtggctgggctcactaccttccctatagaatccctgtgtaacctcacctatgttcttatgcagggagcggataaaagtggctgctagaatgttcctctccttacagctgagctccacaggaggttgaatgccatcatccaccaccagtgtgagcagcttatggacagggtcaggaccaaggtatgaaaactggtaaagaaaaacaaagaaattaatctataaaaccctcaaggccagtaaaagtcctccacagctctatcctgtgtaccaaccaacaacaataagttaggcttgttttctccaaatgaggacctaccagaaatacatttcattatttttcccttcagtgatttacatttcaacatttaaaattattttagtcacagagactgcctttagttaggaccaccagcaaaactacagaccttctaacataaaatataagaagggtgatatgttaaatagcaataaatggcaatacggtgatatattaaatagcaatagtaaggatatattaaacagcaataaatgactactccaaactgatcagaagaaaactatttttataaaatggcacattctagcctttgggcaaaagtttagattccagaagcccagaaaagttaacaacaaacaaacaatgtattttaatatatgagagtggtgcttctaaaaggagttagcttcagcacactgggagaccaagcttgggccagagttacaaacatcttctctattaacttagtcttgaaggcaaaggatcactgttgaagtattctgagttgctgctaattcctgtttctgtaggcatgcgtccttccagaatttatatattcttcatgccatttagtgaggagataatgatgctttatttggcaacgaatcctgtgtacactgtgagatcttgcagaaacactaaaagtgcttctgagaaaaaataaaaggctgagatagtccagagatgaagcatgcttgatgtgaaccagatgtaaggttcagcttacttttgttcctggacacactcggaaggtgtaaaggcgccaggggatgatcttcaggtagaactccttcactgagaattgctggaggaccaacagacaggaaatgaagtgaatgataaataaaaaggctctatttgggtattctaattcaaatatcatagtccctatttacatttctcataacctttcctctccatggacaaaagtaataatttagtgagtactaaagtcaaataaatacattaactctctatttaaaaaggcaaattaaaaatattaccctgatggccaagtgtggatggctcacatctataatctcagcactttgggaggccgaggcaggcagatcacttgaggccaggagttcaagaccagcctggccaacatggcaaaactcagtctctactaaaaatacaaaaaaattagctgggtgcggtagctcatgcctgtaatcccaagtactcgggaggctgaggcacaagaatcgcttgaacccgggaggcagagggtgcagtgagctgagattggaccatggcactccagcatgggtgacaaagtgagaccctgtctcaaaaaataaaataaataaaaaaaatatgactgacaatgcagtttcacacagagatatttcataattgtaatactcaagtctttctaaatatctgggatcaggttttcactttatgagaacagaatatttcacctagaaacaatcaaaatctccttctgctcagccccatgatgctcagaatgacttcctccaagttactggatagcaaacaccagcaacccatacacactgctttatacctatttgaatggtgccaaggatctgccagggaagggaggcaagatggggtgagctggagtggaatatgttggtggtataggggaaggtcctcacacaaaaaagttcatacaaaagaggaaaagacaatgcaaaaattttttaatcttaaaaaatcccttttatctgaatgtgcaggtcagttgttttcttgataaaaaaaagtttaaagaaaatttcaaacacatactaaagaagacaaagaagtataatgaaactatcagctgcttcaacaattatcaattcatagccaatcttgtttcatttattcacttacccatttccctcattaccatcacccctagtccaaattaaggctagatttttaaatgaagaatggtacacagcaaagtgttctgaagtagaacagaattagaactcagttttggttatgagattaaagagatgcaatgggatgtttcacagagtctcatttttatgaggactgaatgaataaggaaaaacaaatattaaaaagaaactaacacaaagtgcttcttagctcaggggcttgggaaattcaccttctttcctctgccaaaatttctttactccaatcctgtagcctaatagtgacatccatttactgtggtttcatgaatcacagaacaaaagatcaaattgttttgacacagcacaagaagccaacagtaatttttatgctagcaagaaatttttaacagttgaaagtggctttctatacaactagttaacaatcttgccctgattctcagactgttactttgtggtttctgctaccaaataccaattacacacaggttcaagcagggggattttatgtcgagaatggaaggtccaacctttggtgacacatagcagtacaccttcttcggtttcttcaccttctcaggggtgtggcactcagagggcgagtcttcatcttcctcgtcaacagcagtggatggccggcgctgggaagaggtcatgtgcatgggtggcaggtgccatggagtgctgctacagttggtagcattataaagataagcctcaaagtaaatgctcacgcctgaagtggacacattgcgttcgacgatattcttctcatcctctgaagtataataaggaataaggtttaaagtagaagtcagagaagaaaaaaattacctatcacaggcttttagtccacaggacaagccaaatgtggcccaaatatcaaatgtttgtgaggtcagacaaaagagtgcaaacaggcaaagaaacggctgaagaacagcactaaatcatacttttcttttaacttaccacttaggacaataatgtcaaattcaccattattgattggctgattttggtatgaaatgcaagcatggaagcagcctcgagaatgcagggtgagtcgcaagaacacctggaaagtctgcctgttggatgttactgatttctcaaatgagacaccagtactctcttcttcttgagggccgagctataggaaggcaacagagcatcacttaacatatagtattttcccatttacaagccactttactccttacaaagagctttcctatctatgatctaatctaaatcacaaaattactaatgagacaggtattgtcagatgaagatacagacagcacagaagtcaaggagaaggaaagagagatcgaagtgaattaggtgtgagaataacagagaaaggagccagctctctctagcacacagataaagaagggagactgcttacctcatgaatggacaaggtgtaattgtgctcatctctcaaggacatggaattgttggtgggattatcatactcatctcggggtactatttgaagggtgtgcggctgcccacaggtcaatacaagagtagaaaagtggcacacaattttggtcttagaaggaaccaccattcctggaacaaagacaatggaatctaacatttatttattttatttttttatttttattttttttgagatggagtctcgctctttcgcccaggctggagtgcagtggcgcaatctcggctcactgcaagctctgccttccgggctcatgccattctcctgcctcagcctcccgagtagctgggactataggtgcccgccaccatgcccagagaatttttttttgtatttttagtggagacggggtttcactgtgttagccaggatagtctcgatctcctgacctcctgatccgcccgccttggcctcccaaagtgctgggattacaggcgtgagccaccacgcccggctggaatctaacatttaaaggtgctcttcagggcacaaagatctgctcagtgggtcctagaaagctaggtttcctcccaattcctagggataaataacactatcaagaggaagagaggccaggtgcggtggctcacacgtgtaatcccagcactttgggaggccaaggccagagaatcccttaaggatcccttaagaagttcaagaccagcttgagcaacatagcaagaccatctctacaaaaaataaaaattagccaggcatggtggttcatgcctgtgtcccagctactcaggaagctaaggcaagaggatcacttttgcccaggaggtaaaggctacagtgagctatgaccacaccattgcattctagcctgtgtgacaaagggagaccctgtctctctccttttttttttttttttttttttttgagacagagtcacgctctgtcacccaagctggaatgcagtggcacgatctcggctcactgcaacctctgcctgtcgggttcaagcgattctcctgcctcagctgagtagctgggactacaggcacccgccactacacccagctaatttttgtatttttagtagagacagcgtttcaccatattggccaggctggtctcaaactccccaccttgtaatttgcccgcctcggcctcccaaagtgctggaattacaggcgtaagccacggtgcccagctaaccctgtctctttattaaaaaaaaaaaaaagaggaaaaaacagaaatagagaaatttaaatgaatttggggaattatttttgttacaaattcttaaccactgcaaaccctaagtaaaatgaaaaaaacttggaagaaataaaacaaaaaaaccaacaaacaactaaacaaatggagacatgtttatggaagatccaacatagtacagatgtcaattttccccaaattgatatataggtttaacacaattcttatcaaagttccagcaagattatttatagatttagttaagattattctaaaatttaaatggaaaggcaaaggaactagaatactaaaacaattttgaaaaagaagaataaagtggagtcagcttaccaatttcaagacttattataagagctacagtaatcaggctgtgtgacttggctcacgcctgtaatcccaacactttggaaggccaaagcaggaagattacttgagtccaggagttcgagaccaccctgggcaacatagtgagaccctattcctacaaaaaagataaaaaattagctaagcacggtggtgcacgcctgtagtcccagctactcgggaggttgaggcaggaggatcacttgaacccaggaggccaaggctgcagtgaatcatgatcgcaccactgcactcagcctgggtgacagagtgagaccctgcctcaaaaaaaaaaaagaaaagaagagggagctacagaaatcaagattctgtggtactggaggagggataggtacacagattaatgaaataagcccccacaaatatgtccaactgctttttgataaaggtacaaaagcaatgtaatagaaaatgaaagatcacctttccaacaaatgatgctggagtaaagacatgtataagcaaaaaaaaaaaaaaaaaaaagaggaccttgacccaaatctattaaaattaactaaaaatggatcatgaccctaaatacacattttcaaactgtaaaaacttttgggaaaaaaagagaacatcttcaggatctgagaccaaagatttcttagacaccaacagtttgaccataaaagaaaaaaatggatgcactggatttctttctttcttttttgagacagggtctcactttgtcacccaggctggagtgtagtggcaagatcacagctcactgcagcctcaacctcctgggcttgttatcctaccacctcacttctccaccctactccccagtagctgggactaaaggtgcacgccaccacacccagctaatttataaattttttgtagagatgaggtctcactatgttgcccaggccggtcttgaactcctgggctcaagtgattctcccacctcagaaagtggatttcatcaaaattgaaaacatgtgctctgtgaataactctgttaagggaataagaagaaaagctcagcctgagcaacatggcaaagccccatctctacaaaaaatataaaaattagccaggtgtggtggcacatgccacagtcccagcaacttgggaggctgagatgggagatcacctaagccgggagaggtcaaggctgcagtgagccatgactatgctactgcacgccatcatgggtgacagagtgataccctgtctccaaaaagaaataaagaaaagctacagatggggagaaaatatttgcagaccatatgtttaacaaaggactagcatatagaatatatacagaactctcaaaagtcaacagtaaaaagccaaaatgggccgggcacggtggttcatgcctgtaatcctagcactttgggaggccaaggtggatggatcacccgaggtcaggagtttgagaccagcctgtctaacagggcaaaaccccatctctactaaaaacacaaaaaactagccaggcatgatagcagatgcctgtaatcccagctacttgggaggctgaggcaggagaattgcttgaacatgggaggcggaggtcgcagtgagctgagattgtgccattgcactctagcttgggcgtcagaacgagactccatctcaaaaaaaagaaaataataataaataaataaataaataataataatcccattagataatgggcaaaagggccaggtgtggtggctcacgcctgtaatcccagcactttttggggccaagggggtggatcacttgagctcaggatttcgagacctgcctggccaacatggcaaaactctgtctctacaaaatatacaaaaattagccaggcgtggtggtgcctgcctgtaatcccagctactcaggaggctgacacaggagaattgccagaacctgggaagaggaggttggttgcagtgagtcaaggtagcaccactgtacaccagcctgggcaagagcaaggatgtctaaaaaaaaaagaaaaaaagaaagaaagaaaagaaaagaaaagagaaaagaaaagaaaagaaaatggacaaaagacacgaagagacatttcaccaaaggatacatagatgacagacaggcacatgaaaagatgttcaatagcattaactatttaagaaatgcaaattaaaagcacaatgagataccactacacacttatcacaatggctaaaataaaaaataatgacagcattaaatgttagcaaggatgtgaagaaactggattattcatacattgctggtgggaatgtaaaatgctacagccactctggaaaagaatttggcaatttaaaagaaactaagcatacaactccaatacatctcagcaactgcatactagagaaatgaaaatttatgttcacataaaaacctgtaagtgaatatttatagcagctttattcatcatagcccccaaatggaaacaacccagatgacctttaacagatgaatagttaaacaaactggtacattcagaccacagaatatacgtagagaatccctaatccaaaaaccagaaatccaaaatgctccaaaatccaaaacattttgggtacctacatgatactcaaaggaaatgctcactgaagcatttagggtttcagatttttggcctagggtgctgaagtggtaagtaagtatattgccaatattccaaaacccccaaaaatccaaaatccaagacacttctaggcagacatagtggctcatgcctgtaatcccagcaccttgggaggccaaggcaggaggattgcttgaggccaggagttagaaaccagcttggttaacataatgagactgtctctacaaaacaaaaaatcaaaaaattaaccgagcgtggtggtgcacacttgtagtcccagctacttgggaggctgaggtggaaggattgcttgggcccaacaggtcaaggctacagtgagccatgatcctgccactgcattccagcctaggtgacagagcaaggccctgtctcaaaaacaacaaaacattcctataccacgtttggagagaaaaaaaccacaaaaccacacatctggtcccaagcattttggatgaagaatactcaacctgtactactcagcagtaaaaaggaaccaactactgatacactcagtaacctggatgaatctccagaaaattatgctgagtgaggaaaagtcaaccccaacaggttatatactatatgattctagttatataatattcttcaaatgacaaaattatagaaatggggaatagattcgtgggttgccaggggttaagaacaggttggggatggggggcaggtacggtggctcatgcctgtaatcccagcactttgggaggctgaggcgagcggatcatgaggtcaggagatcgagaccatcctggccaacatggtgaaatcttgtctctactaaaaatacaaaaattagctgggcgtggtggcacgtgcctgtaatcccagctactcagcgtgaggcaggagaatccactgaaccagggagttggaggttgcagtgagccaagatggcaccactacactccagcctggcgacagggcgagacgccatcaaaaaaaaaaagaaaaaaaaaaaaagaaagaaacaggttgggggggataggtgtggctgtaaaagggcaacataagggatccttgtgatgatggaaatgttctgtaccttgactgtatcaatgtcaataacctggctgttatactgtactagtagttttggaaaatgttaccattgcaggaaactgggaaaagggtacaccagatctctgcattatttcttacaaatgcatatgaatatacaattatcaaaaaataaaaagtttaatttttttaaaaaggctggtacatgtaagggtatgagctgttctccactggtggcaaagaggtgggtgatgataattcatatgaaaaggagtatctgagtgaggcacttaagcaaaggagaggatacatggaaagagagacggcttgagagccactttgtccagagccttactctgctatcagagaaagaaaattaaggactagtcaagcaaagatacacaaatcttaaggccccactcagtacggtttcacttcaaaagttacccagggaccccaggtcctattatttctgtggataccacagcccttagcccttaagaactaaccaaactaatgactcagcaattttactcccagagtaataaaaacatgtcaacacaaaaacttgtacacaaatgttcacagtagtgttgcttacagtacccaaaagtagaaacaattcgaccaccaactgatgaaaggataaataaaatacggcatgtacataaaatagaatattatttgtcaataaaaagaaatgaagtacagattcacgctacagcatgactgaatctggtttagatatttgtaccctccaaatcgcatgttgaaatgtgattcccagtgttggaggtggggcctggtgggaggtgatggggtcataggggaggatccctcatgaatggcttggtcccctcctcatggtaatgaataagctcttgttctgagttcatgcaagatctgtttgtttagaaaagcccagcacctcctccctctctctctctcttgctccctctctcaccattaggcactcctgctcccgcttcgccttccaccatgagtggaagcttcgcgaggcctcaccagaagcagatgctggtgctatgctttttgtacaacttgcagaaccatgagccaaataaacctcttttctttataaattacccagtctcaggtatttctttacagcaagacaaaagcagccaaacacagcaggcaaatccacagaggcagcagatgagtggctgcctaggtctgggggatttgggggaaaagtgactactaacatgtatggggtttctttttgaggtgatgaaaatgctctaaaatcgactgtgatgatggctgcatttaaagaaccattaaactgtatactttaaaaggatgaattttatggcatgggaattaaatctcaataaaggtattatttttaaaaaggaaagacaggatggaaagagagagagggaaggagacaaagggaaaaagaaaggaaaaaagaacctaccaggttgaaaaattttgtagtagggactatatgccacatttaatccaccaagcttcactgtgatttcataacgcccagccttgcgcacagtgaaggccacttttactacgttggaattgggctcctgaaggacttcctgggtcactggaatttccactgctagctcgacatgagagatgtgaactcttagtcccacaggccgatgtgcagggaaaggctgcccgttcttatagaataactgccatggggagaagaaggacacctgttagcaagcagaggaaaaaaacatttcctgtgtagagtgagtggggagagaggaagtagctggcagagaccacaccagtaaatcccagtacctaccctgttcctcacagtcctgctcacaaaaacacagagagaaacaaatcccctcaatactctaaagaaaaccattaagtcatgagcaaattcttaacttgttcagaggacaagggtagaatttaccactaaatcaagaaaatgtccattttaacttgccacttctgaaccaccaatgctgcctccttggtcttaccagccctttatattatcaatgctaacccaaatttaaaggtaagttagccggcagcactggcaatgagtgaactaaagcgttaccagacaaaggtaggaggggttcagactctcaagccaagcttaatgctacagtggagaagtcaatgcaggagttgggaaattttttctgtaaagtgccagagagtaaatattttggctttgtggaccgtacacaactactcaactgtcataactactcaggtgtgaaaacagccatagtcaatacatgatgaatgggtgtggctgtgttccaagacaaatgtatttaaagaaacagaaggtgggcctgatttgctaacccctatctataatacttactcttttctgtaatatttttcttattttgaaaaggtaacattaagctttatacttcttcaaagctaaggacctattaaatcaaaatgacagagaaatttgtgactcttcagatagtagcaattcactagttcctggagggagttgaaaaacaagagaaaatgttaacattccaggccagcacctgggctctggaaagcaagttactcagaaaccccaatgggtatggagacagaaacattcccttacatgcactcggaaggccatgctgtggcccacctcataggggtccttccaatcccaggagactttgcaagaccggggatccaggtaatttccccgcacgtagtcataaatagtccggtcccctcggcgctcgcggtcctcattctggaggaagctgactacacgtgcggcaagctcaaagaggaacttaattgtgaagaagaatgcaaccacagacactgtgattccacctatgcaaaagagagaacacacaaaccgcctgccagttacacattacagcttttcattatgcaacaggccagccatttctcaaaaattaaaggaggtcaggatgagactgtaagactgccaaagaaacactgcactgggcactacctctgtagataagaaaggaacttctacaccaggggtcagtaactacagtcctcaggccaaagcccacccactgcctattttggtaaataaagttccattgggatacagccacacccatcatttataaattgtctatggctacttttgcactacactggcagagttgagtcattgaaatgagccttcggaaccaaaaatatttactctctggccttttatagaaaaagtttgcaaactcttgctctatatgagctgcatataatgtccgccctgctccctaccttcctgcacttgctgggcaccccacagaagcagtcaaaaggatgtgcctttggttcccaccatttccttcttaaagaatgcattatttgggagccctcccctcccttgtgtacttggcaaaagtcttctccaatccccaccagagttagcagttcccttttctgggctccttcaaactcctacacattcatctggtataacttttctcctccttgaccgttcccctttatgttatgaatgcctactccttgaaggcagatttttgtcttattcaactttagactccacagtaaacagtgtctggcattgactataattgctcaataaacccaaatgaatgaattccaatgccaactctgtgaaggtacattctggcacgactagaaatattttcagctccattttcaaagggaaaagaataggcagaaaggcaaaaaggacccaagcaacctttacaaaaatataatagagagagctctttccataacgtaccaataacgtaaaacatcaggtcccgtcaatgccaacagacagccgaggatcacagctgcagctgttaaaagaaaacttgtttagtttttgtctccaactctgcctcatagctatctcagagtaagacaaagaagagtgtatggcgtgagccaaacaactctctctagtccagagccttactattcctatcctctttctagcttgacaggtgccgtataatatatttcagagaaacaaagagactgcatcattccccttaaagacttccaatctactgaccactctaggaataccacaaacagccacttgctttattgctaatttcaaaatgcagtaacatggctttcatcttcttagatccatagttcccaagacagtttccctccctcatgcaaagtggtgctaattaacacatgcaaagagggtaatggagtcactttccccttatgtttgccttttgggagtaattcagctaagtagaaatagctatataaaatgtagattttttttttttaaagcaagtatcattatcatcatgttggcattatgtaattaaaatgaactctgggtcatcccaataataagcagtgggtctgaaagtgaagtcatttatgctgttaccaatcagacaaactaatgggccctctggaagatgagctcagcagaaagaccaaggagaggaacaaaaggagactgtacttctcatcctcagtcatgcctgtcaaggtaggagtctgagggaagactttcactgttgttaaacttgtttccagaataagacttcaatcttaattactcatttgatcatgtgaaccaataaaagtactgccaaggaaaaatgcaatgtatgctaacgttcatatcttatcactgagtctgaccttagcacaggctgtatatgctattttacaatgcatgaatgcactctttcttttcaagtcagcgtacactaaggctgtcaatgttatcttgacccaacaccttttatcagcactagaatattacgtagagacaagacagctaaaaatttctaggctcagatctgggagggaccaaaacaactttttttcagggtgtgtttttacatctgattgtgcttgcttagttcctctgataacaatatacccagtggaacccacagagagtaggtaatttgaggaatgaccgtcaaaagtttcatacaaatcctacttagagtgattatctaaagtcctactagaaaagaaatccacactgggaacattagaattgtcacgtggatgaaggtgctcccaaaagggtctattacagacaatataaagagccaaaatttgggatcacaactactgaacctccttcccaaacaagtatctcatctcttgggaccctatgctgaattagctggggacccaacagctatcatctcaaaaatctgctacgatctctcaaaaagcatctgtctgcatcttacaggatgcactagatgacttggtgggaccaaaactggcagtttaactgccttaggtacttcctcagcgggatgccattcgatctgaccctagatgtgaaatttctggtcctcagggaagttacagcactcagcaaagaaatgaagtatatgtggctggtgttacagatttgtggtcttcttagaggaataaaagcagtgccaaatgtatggcttgagtcatgagggctagaaaaattcccacctactatctctgacaactacaacaacccttctgtgagagacagctgacatgcagtaattgaaaagcctggagaacaatcccaggactgcaaactgtgtgacctatctaggcttcagaatctcattgctgtaaaaagagttgcaatttaataatttctatggtatcatctcctttagtatgatatgacttcaatgcaactccccatggccatcaaagctctagccaaacagcataacaaatagcataagatagaggataagggggcagactctagagttagattacctggcttcaaatccatgccccatcattcataatgtgaccctggacaagtcatttaatctttgtaaaggagtgccagtttccttatatgtacctcacggggtgctgtgaggattaaatgagttaacacatgtaagcagcctacagtagtgcctggcacacagtgagttctcaaagttttaatgattattacaattattatcaatagtagcgccagtatcactactcctttacttcaaagctgataggaaactcctctctactggcccacactttcttcaaagagaaatgcatctgaatttcaaaaggcatggcttctattactgtccctgaacagtctgcatgggagttctttatactattctaattttatgcctaaaaaattttacaataaagggttaaaaactcatcctaaaataattcgtccaacaaatactgagtacttacttttttttttttttttttttttttttgacggagtctcacactgtcacccaggctggagtgcagtggtgtgatctcggctcactgaaagctctgcctcccgggttcgcgccattctcctgcctcagcctcccgagtagctggcattacaggtgcctgccaccatgcccagctaattttttgtatttttggtagagacgaggtttcactgtgttagccaggatggtctcgatctcatgacctcgtgatccacccgcctcagcctcccaaagtgctgggattacaggcgtgagccaccacgcccggccctgagtacttactcaatgtgccaggtacagggaggacaaattagaacatgagagccacagtccagttatcatgaagctggcagtaatgagctttaccttgtggagtcctcggccatttttcccctgtcacttatttctcaatcaaatcatcactactgattttcaagatcagctaaaccttctccaatgagtcagttctacatttctgccccacctctattcatcatttaaaactcaacagaccaattactactttttccccaaacaactgtcttcttgaaacctcctcatgaccagagagttagttctatcaattcatcattcgctgacatcaactttacaaaatgtcccactgctctacaacagctctcaaaccactccccacccccatagtatttactgacctcccagtttcacccatggtcacattctgaatttgccttcgttctacaaattccccctttctggttcctcctgaattctctcaaaagcccttctattttatttttatttttatttttattttttttgagacagagtcttgctctgttgcctaggatggagtgcagtggcataatcttggctctctgcaacctccacctcccaggttcaagcaattctcctgcctcagcctcccgagtagctgggattacaggtgcccaccaccacgccaggctaattttttgtatttttttttttttttagtagagacagggtttcaccatgtcagccaggctgctcttgaactcctgacctcaagtgaaccacctgccttggcttcccaaagtgctgggattacaagcgtgagccaccacgcccagccaggcctccctatttttgtcactcaaatcgcttttattccagatcttacctctgttctgtaagcattttctgtaagcatgttccgaccctgttgggggctctctctgtcctgtatctactgctacccctaccccacgctattctccttggccccagttgctataataccttgttattcatcctatgatctatccaaattagatcctttacacttttacatacagctctgaaatgtcccctctccattccttttgaaaactcatctcctctgcctagaatatcctccttccttttattctctatgcatggaaaatctcctgatcctgaggtctaggaaaaatcctatccactctctccaaaatcttccctaatattaaatttagaaattccttccctcatgtgaatctccatagaacattgtttttatttatcttatagcacttttcttttttttttttttttttttttgggacggagtttcactcttgttgcccaggctggagtgcaatggcgtgatctcagctcaccgcaacctctacctctgggttcaagcgattctcctgcctcagcctcccgagtagctgggattacaggcatgcaccaccacgcctggctaattttgtatttttagtagagacggggtttctccatgttggtcaggctgatctcaaactcccaacctgaggtgatccgcctgcctcagcctcccaaagtgctgggattacaggtgtgagccaccatgcccggcctagcacttttattcttttagtctcgttttttcattttagagtggtaatgagtagtcttaaaaatcctccaggctgggcatggtggctcatgtctgtaaccccaacactttgggaggctgaggtgggaagatcacttgagctcaggagtttgagaccagtctgggcaatatagtgggacctcacctctactaaaacttgaaaacaaattagctgggcgtgctggcacacacctatatccaagctactggaggcaaggagggcatctgaggcagaaggatcccttgagcccaggaggttaaggctgcagtgagccctgatggcaccactgcactgcactccaactgcacaacagagcaagaccctgtctccaaaaaaaaaaaaaaaaaaaaagctccaaagaaaccaacataattgcatatagtaacttcaataaatatgaataagatcaaatgtctgtccttttctttgtccagaatgcctaaggatcaggaattttccagatgggatcttccttgtagatagagtttgaaaggatttctctaacagtatattcacttgagccaggcgttgtaagttcctcaacctaaaagttgccaatttaattcagttcaacaagcaggtatcaaatgcccaccactggggttgcagattcccatgcatggtatttttctacagcagtttctacagcatgctctactttttgctattcataattttcctgtatgaaattattttggaactttcccaagtctaattgcagtacaaacaagtatgtgaggctctactgtactatttcatcaaattgttatgagtactttgtgtgttttcaagttcatctctttagtgtccttgacctttataaatatggcatattgtgatactttaagctagaagaaaaatatgacagtagtaaattaacagctttctacccacttattgagtcacttatcacaggccaaacactgccttcagtgctttacatatgttaacctaagtaactgtcaccacgacaacttggtaagatgaatactattattctcgttttatggattttttttttttaagctgggcttaaggttgctgaacatctcacattggggtaagtgacagagttgagattcaagccgggctgggaaagcctagcagggcatggcggctcatacctgtaatcccagcactttggaagccaaggcaggaggatcacttgagctcaagagcttgggaccagcctgagcaacatggcaaaaccctgtctctacaaaaaatacaaagaaaaaattaggatgtcatagtgcacgcctgcagtcccagttacttgggaggctgaggcgggaagactgcttgagcctaggaggtcaaggctgcagtgagccatgattgtgctactgcactccagcctggttgacagagaaagaccctgtctccatttaaaaaaaaaaaaaaaaaaaaaaaagcctacgtctaactccgaagctcaatgctcttaacctctacagtgaatcatgaaaaagaataaagtcataaggatagtgaagtatttggggaaaaaaagatttatgaaaacaggtaaaacaaagtatgagaaaacactatccaatcttactgtgaggaatctcatagcaaggctaaaattagaaagataaactcttatggctcttttttaatcttttgatatataaataaagcatgtcaaagaaaagtggaatgcaatgccaattctctagtgcagaaatatcacttgcttacgaaggttcctggtctggttgcttaatactacagcattttggctcacattacctaccaaaggggaaaaatacttcaaaatatctgtctcaagggactgttagaaagttgattaacatacatattctaaaatcctctgctttttcggagtataaagatttttaattacagtagcaactaaattttagccccaacattgaaaaccagttgtgaaaaagtcatttcccaaaaatggagaactggtttcttcatatttaaaattgctctgctggggacaaagtcaattctcactgcaactgtatactttaacagctatcccttgctgaaaaggcttaggaattggtcactggatccatgttgtacatcccaataactaaagcttaactcagtctgttaccttacctttaaacgagggcccatgttctgagaaccaagtagagcactcctattcaccaaagcaggtaacttttggcccctttcaccttgtcttccaacttccacatgaaagaaaaacgccacaaggtcaacagaaagggtctatccatcagactttgtcacagtaatcaggtcagtgtttctgggatgaactggatgaactccagggtagagaaatacagcccaagaatatatcattcctggacttctctctagtgcagggtgcaatcgactgccaaaggacgccccaggatcctgtccaaaaaagaaaacagggttagttggaataggtttttatttctgaaaaggattccccagaaaaaaatcaaagagaaggtagaacaggcagtggaaaccctgggacactaaaaataaccaaaaattggtaaactctgaccaagcattctcaattaaaactccacacagtttccttgaggcctctctccaactccataagaaaagtcaactggcagcctcactgtctataactatgtctccggctgagaagtgccagagcttccttcagttcactgtccccaaatacttccctatccttatgacattattctttttcatgattcagcatagaggttaagagcattgagcttcagaattagacacagtttttttgtttttgtttttgtttttgagacagggtctttctccatcacccaggttggagtgcagtggcatgattacagctcactgcagccttgacctcctgggctcaagcgatcctcccgcctcagcctcccaagtagctgggactacaggcgtgcactaccacacctggctaattttttatttgtgttttttgtagagacggggttttgccatgttgctcaggctagtcttgaactcctaagctcaagaaatcctcctgccttggcctcccaaagtgctgggattacaggtgtgagtccattcttcagtagaagcaaactaggccacagacttaaagagtaaccttcagcacaaccacatacccagtttgaatataatggggttgcagcacagggtctggagcaaccacaaagacaagtgagatgaacgcacagccagaaccaggttacggacagccttatatgccatggtaaggaattgagacaatattcagctggaaaggagaaacttccaaagagctttaaagcccaatctatcagcctatgcagtctgctcccttcgtgcccacatatgcatttccaagacatgcttaaataaagttgattttatatttaaaacagtaaaatctgctactacgagtcaggggaaaatctgtgaactttcaaaataaagtcactaaataaagtccagtaaagtcagtttataactctcgaagatattcatgaaccaaaaatgtagcagaaagggggtttatggcaatgcatacacaaacagccaccataagacaaatgagaagagactactaattagtaaatgaagagacagtcttaccatatggcaggaactgttctcagtgcttcatacacataaactcacagatacaattatccctattttaacacagatacaattatccctattttacagatgaggaaactgggacacagaaaggttaaagtacttttccaagaaaacacacagtgagtaatagagctgagtcaaactcagacaacctggacccagaatccctgcttttaatgactactctactgcctctccactatgggaaaccaaggaagaaagcacaaaatgctaaaagaacagaatgagtgaagaccagtaaatgaaattaagttggcaaacttttatcattaaaaataaataagtatatgtatttagtttaaaatacagcaacatgaccgggcacagtagttcacgcctgtaatcccagcactttgggaggccaaggcaggcggatcacttgagcccaggagttcaagaccagcctgggcgacataacaaaaccccgtctctacaaaaaatacaaaaattacccagacatggcggcaggcgcctgtggtcccagttacttggaggctgaggtgggggttggcttgagcccaggaggcagacgttgacgtgagccgagatcatgccactgcactccaccctgggcaacagagccagacccagtctcaaaataaataaataaataaataaataaataatgccaacagacttgccaagtacaagagccaaaacctgggtcaactggctactggaaccagcttaaaggatccacaaacaacagactatatacgtaagctataagagagcactatgtagaatactatataaggaatttttaaatgacacttttaaggaataaacaacatagggaaatgcttacaaataaaatgttaaataaaaaagtaggaacaaaactgtttatgtagcacaagtccaaatttagaaacataacattacataaagaagactgaaaggaaaatataaaaatattaatagtgatcatctcttggtatacggaattataaataatttttattttctacctgtaccttttagtgtttttcaaattcttaatgttgcaaggacatgtaaaaagtttctatttctggagaacacatttttggtggggactgattttccttaaataagggagagaatgggcaagttatccttttttcaaataagaaaatggtataaagaggctgggcacggtggctcacgcctgtaatcccagcactttgggaggctgaagcgggcggatcatgaggtcaggagatcaagaccatcctggctaacacggtgaaatcccgtctctactaaaaatacaaaaaattagccaggcacggtggcgggtgcctgtagtcctagctacttgggacgctgaggcaggagaatggtgtgaacccgggaggcggagtttgccgtgagccaagattgcgccactgcactccagcctgggcgatagagtgagactctgtctcggaaaaaaaaaaaaaaaaaaagaaagaaagaaaatggtataaagaaattaagataacagattatactgaacttttctttccttctttttttttttttttttgagatagagtcttgttctgttgcccaggctggagtgcactggcatgatcttggctcactgcctcactacaacctccacctcctgggttcaagcgattctcttgcctcagcctccctagtggctgggactacaggtgcgtactactatgcccagctagtttttgtatttttggtagaggcagggtttcaccacgttggccaggctggtcttgaactcctgaccacaggtgattcgcccgcctcagcttcccaaagtgccaggattacaggaatgagccaccacacccagcctgaacttttatttctattcactatgatgttagcaggtttccaaccctgtgatcagctatttgattattaaatcaaataactcctagttgtaatataagctttactatccctaccgtgagctaccatgctcaccgcaatgcttcagtacctctactgagcttcaaaactcaactcaagcactcccccttctctggtcctgctccaaggcctctctgaggactcttcccacaccagatagaatcagccacttcctcctttgtggtgctcctctgctgaagatacctccgttatagcatttactagtctgtattgaaattatttgtttatatagcagtctctcctaatagattgcggactccccaaggaacactgaccaggtcataacattgcctccccaaggctagtatggtgttcagccctgctatctcagagtctgtactttcacaagatccccaggtgagtcctatgtatgctgaagtttgagaaacatggtttagactctagagcaatcagtatgagaaggggctcaacattctgtatctctaacaggttcacaggtaatgctgatgctgctggtctcctagaccatgctttcagaagtgagaatccaagttaagagtcagcaagccaaatcctaacagccgcctgtttttgtgaaaacagccaagttcattcatttacatattatctgtggctgcttttgcacaatggcagagctgagtagttgcagcagagacatatggcccacaaaactttactatctgatgctttattgaaaaagtataccaattccaggtgtagaggtcttagtcttaaagctacacaactaccttatataaacaaatacatttttctaaatcaaagaaagcatacaaatcattttcttccagttctaccatctcttcttaggaaaagaattacaaaacttgcaatgttatgcaaacacatctagtttcaactatgacttgatggctttattcttcccataccccaattaggaattttacagtcattttccaaagtatgtatttcatacaatcatgcttgcatttgatcaaggctaatatttcctaaaactagtatctcggggaccaaatactgtatccgggttgctaaaattactataacacatactactaactcagtctctacttctaaagtgctattctaaaaagctgtgaaaggccaggtgcagtagtgcacacctgtattcccaacactttaggaggctgaactgggaagatcacttgagcctaggagttgaaaccagactgggccctctctaaaaaaataaaaataaattggtcaggtatggtggctcacgcctgtaatcccagcactttgggaggccaaagtgggcagatcacctgaggtcaggggtttgagaaaagcctggccaacatggcaaaaccccatcactactaaaatacgaaaattagccacgcatggtggcacacacctgtaatcccagctactcaggagactgaggcaggagaatcacttgaacttgggaggcttaagttgtagtgagccaagattgcgccactgcactccatcctgggtgacaaagcaagacttcgtctcaaaaaataaaataaaataataaaataaaataaattagctgggcgtggtagcatgcccctgttgtcctagctactcagaagctaaggcaggaggatctcctaagcccagaagtttgaggctacagtgagctgtgatcacaccacaccactgtactctagcctgggtaacagagagagagatcctgtcacacatacacacacacacacacacacagccatgaaaaacatgatgtaaaagtccatttcaaaattttggtgcatacagagctagtggcagcaaacagaagttctgatatcacctactgatgtccaccaaatgacaagacaaaagaaagacgtttgttttgtaagatgcaatctccagcattctccacagagaagcaccagccatgagtccagggacatgaacttaaaaaaacaaactattcaattttcaaaaagtgcacaggttagggtggtctaactaaggaggttccaagaatatatcagacactttggattatcagtttacatttactatggcttaattccactcttagtttatactccccaacccaaaatcccaccataaaagattgccctcctccatcaagtttatactcttgagatatttatacagttgtctatttctgctattgtggtttagccaagttacatggttttcatttatactttcttcatcagtcagcctctccagtctcttaatcattcctgtgggtcttctgtgaactctctccagctgatccccaacgatctggtaatgaggtgcctccaaatgactgcagccttccagggacagcctcattagtcagcaggatgaactcactctcctcagttccatgacatactactcttgagcaggcaatcccccaaatcacagaaatctactgtgctgccgtattagactgtacctcattctataactcccagatttggacactggggcatgctagaatgtgctagaagccagaggataaatgacccatgttcctacagcatctgtttcactagaggatgagtgactggggagaaaaaaaaatttcatgttaaatcaaactcatagataataaaacagaatgtaatatttgcatgaatttctaaagataaaacatggatatgttgaatatattcatagatattctgaacttgaagcagaaaggctgcttgggcctctgctcccggcaccaaggagttaacatatcctttaccactagaggtacttgagccaaaaccctcactcaacttctgatctactgtgcattaccttactcataccatatactcacattttaaatgatattatttttctgctatgtttccccatcctagatatctatatttattttctctttgcctaaaatcttttgctgcaggaacacgtgtcatttatcttctggcttctagaacattcttgcctgccctgatgcccaaatctgggaggcatgaaatggggttacagtctaattcactcgataattcacagactaccaacatctataggttcctcttcatcgttcattcttcattcatttcacatttcttgagcatttgctatatactgggctacgtgataaaagctaaagtcacaaggataaataagacagggtgctttcttaacctcaatgaacttggtccgccatgggagaaggacaatgcaatgttgcaagtgccataaaagaggaataagcaaagtatggagggcagaggaaggagaagtaactgtatgtgcaagtggaaaagcagagacaacagagctgattacttaagaatgagtaagcaggctgagcatggtggttcatacctgtaatcccagcactttgggaggctgaggtgggaggatggcttgcgcccaggagttcaagaccaatctgggtaacatagtgagatcccatctctaaaaaaaaaaaaaaaaaaagctgggtgtggtggtatgcacctatggtcccagctactcaggaggctgaggtgggaggatcatttgagcccaggagggtgaggctgcagggagccctgactgctccactacacttcagaccgtgtgaagagcaagactctgtctccaaaaaaaaccaaggtgtttagaaagaccacctggggctaaactaggatgactaccatgtagtggttaagagcatgaatcttactactgaatgatcttaaacaagttacagcaggtcctcaaacgacatcagtttcattcaacactgttttcttatgattttgaggagtaaaaaaatggactcctggcaggcaccaatgtgtggagttcacacattctctgtgtgggttttctctggatacttggatttcctcccacatcccaaagatgtgcacttcaaagttaactggcatgtctaaagtgtcccagtctaagtgacagtgaggggtgtgtgtgtgtgtgtgtgtgtgtgtgtgagagagagagagagagagcaagagcaagagagagagagagagacagcacacaagcgagagagccctgcaatagaatggcgtcccatccagcgctggttcccaacttgcaccctaagccctggccaccctcaaccgtggactggaataattgggtaaatgttataattatctaacttgtttttatcaatctttcttatacatactgctctcatttattttaatatgtatattatgttctggtctttatttaaaatagtttggtgatatttttgtgaccagaaatatgccataggaacttaattcttgtttatatcaattagcctatggtaaaactggttatcaatatacatcattttgtttgaaggagaagtttccaagaacctatcaacatcaagtgaggacttgctgtaaatttctcttcagttgcctcatatgtaaaatggagatgcactgagaaaagaaacgaatccgctgctcttggggagcaagacttggagaataaggacaaggagaattgcttgagactgaaactttacacccaggtgatatggagtgccttgggggacaaggctgtatgcacagaccaggctgctgggttgccaggttatgagggtggtttgtgccaggccacaatagcccaacccacagcaagtgaggaagatggcttcaatctacctgaaggactcactggttttccagagagattccatgtggaaaaaactacagcaacaatccaaaataatggattttccagtgttctctgaaggatgatgataacaagaatcaacctttattgagaacttactatgtgccaggcattgtataaagtgctacatctatattatctcatttaactctcacatcaaccatatgaggaaagcatactttatccatattttatagattaggaaacagaagcacagaaagctaaaatgacttgcctatagccatctagtttataagtgaaggagtcaagcaatgtgattccagagtttatattctttctctactcttaactggcaatactgatgtatcaaaaagaacttccagaaggggggaaaaagatattattcttgggataggaagaattaagctcagaaatatttaatttgaaattttagccgggcgcagtggctcacacctgtaattccagcattttgggaggccaaggcaggtggatcacgagttcaggagatcgagaccattctggctaacatggtgaaaccctgtctctactaaatatacaaaaaaaattagccgggcatggtggcacacgcctgtattcccagctactggggaagctgaggcaggagaattgcttgaacccaggaggcagaggttgcagtaagctgagatcatgctactgcactccagtctgggcgacagagcgagagtccctctcaaaacaaaacaaaacaaaacaaaaaggaatgttaaaggaatatgacttcattttagactttaagcaacaacaacaacaaaaagatgttttttaaccgagagagaaaaaggatcacacattttaaatgaagtaactctggggacaatgtgaaagactctgaagggggacagacccattaatgagcacaagataaggggctactggtccaatggagtagctatacactggccacaatatagacagggtccaacatagaccctcattagtcacattggttgagggtggccagggcttagggtgcaagttgggagccaaccctggatgggttgctctcctgctttatgctctcagaagcaacaggatcaatgatctgtgaggtcaaatgaataaacaagaggaagaagccaaggaaaaaggcaaattttctatggttgggagcctggataaatgaaggagaattaaggaggcaaagcaaacatgaaaaaaaagatatattagtccaatttcatgctgctgttaaagacgtatcagagactggttaatttacaaagaaaaagaggtttaatggactcacagtaccatgtggctggggaggcctcacaaatcacggtggaaggtgaaaggcatgtcttacatggcagcaggcaagagagaatgagagccaagcgaaaagagaaatcccttataaaatcatcagatcttgtgagacttattcactaccacaagaacagtatgtgggaaactgcctccgtgattcaattatctcccactggatccctcccataacacatgagaattatgggaactataattcaagatgagatttggatggggacacagccaaaccatatcattccaccccggcccctcccaaatctcatgtccttacatttcaaaaccaatcatgccttcccaacagtcctccaaagtcttaactcaaagttcacaatccaaagtatcatctgagacaaggcaagtcccttctgcctatgaccctgtaaaatcaaaatcaagttagttactttctagatacaatgggagtacaggcaatgggtaaatatacctgttccaaatgggagaaattggccaaaacaaaggggctgcagggcccatgcaagtccaaaatccagcagggcagtcaaatctcaaagctccaaaatgatctcctttgactccatgtctcacatccaggtcacgctgacacaagaggtgggttcccatggtctggggcagctccatccctgtggctttgcagggtacagcctcctccccagctgctttcgtgggctagcactgagtgcctgaggcttttccaggcacatggtacaaactgtcagtgaatctaccactctggggtctggaggacggtggccctcttctcacagctccactagacagtgccccagtggggactctgtgtgggagcttcaaccccacatttccccccaacattgccctagcagaggttctccatgagggccccaccccatagcagacttctgcctgaacattcaggagtttccatacatcctctgaaatccaggcagaggttctcaaacctcagttcttgacttctgtgcacccacaggctcaacatcacgtgtaagctgccaaggcttggggcttgcaccttctgaagcgatggcccaagctgtaccttggctcctttcagccacagctggagcaactggggcacagggcaccaagtccctacactgcacacagcaggggggacctgggccctgccttcaaaaccattttttcctcctaggcctccaggtctgtgatgggagtggctgctatgaaaacctctgacatgccctggagacattttccccattgtcttggtgatttggctcctctttatttatgcaaatttctgtagccagtttgaatttctcctcaaaaaatgggtttttcttttctatcgccactgtcaggctgcaaattttccaaacttttatgctctgcttcccttttaaatgtaagttccaatttcagatcatctctctcaaattcaaagttccacagatttctagggcaggagcaaaatgattccagtctccttgctaaagcataacaagagtgacctttgctccagttcccaacaaattcctcatctccatctgagaccacctcagcctggatttcaatgtccatatcatcaccattttgttcaaagtcattcaacaagtctccaggaagtttcaaactttcccacattttcctgtcttcctctgagccctccaaactgttctaacctctgcctgttacccagttccaaagttacttccatattttcaggtatctttacagcaccgcctcactcccagtaccaatttactctattagtccattttcacactgctgataaagacatactagagactgggtaacttctaaagaaaaaaggttgaatggactcacagttccacatggctgggaggcctcacaaccatgtcagaaggcaaaaggcatgtcttacgtggcagcaggcaagagacaatgagagccaagcgaaaggggaaatcccttataaaatcaacagatattgtgagacttattcactaccatgagaacagtatgagggaaaccaccccatgattcaattatctcccactggatccctcccacaacaatgggaattatgggagctaaaattcaaggtgagatttgggtggggacacagccaaaccatatcaaaagataatgagtagagaattaaacatgttaagtttggagtgtctacaggatatccaggtgaatacattcaaaaggtacatagaaatacatttgtatcacacgcaaaatgtagtccttcgtgtgtagcattttttcacttagcataatggttcttagattcatacatgttgttacacatttcggtagttcactcctttttcctgcagagtagtactccattaaatggacatactgcaatctgtttatccattcaccagatgaaggacatttgggttacatccagtttggtggtatcatagataaagctgctatgaacattaagctacaagtctgtgtaggcacatgatttcatttctcttgggtaaatatctaagaatgggattgctgggtcatatggtaagtatctacttaacttacaagaaactgccaaaccgtttaccaaagcggctggaccactttgcatttccaccagcaatgcacaagaggcaggttgctctatatccaccaacacttggtactgtcttaatgttacccattctaataggtgtgaagtggtatctcactgtgattttaatttgcatttccctaaggactaacaatattgagtatttttttcatgtgtttattggttatttgtattagtttctttgaagtatctattcaaatcttttcttttttaaaaatcgagctgtttgtcttcttactattgagttgtaagagttctttatacattctaaatgtgaaccccgaatatctgagacaggtctcagttaatttagaaagtttattttgccaaggttgaagacatacgcccaggacacggcctcatgaggtcctgacgacatgtgcccaaggtggttggggcacagcttgcttttatacattttagggagacttgagacatcaatcaagatgtatactggctcagtccagaaaggcgggacaacttggagtagggaggggggcttccaggtgagaaaaatggttgcattattttgagtttctgattagcccttccaaagaaggcaatcagatatgcatctatctcggtaggcaggggatgactctgaacagaatgagacacagatttgccctaagcagttcccagctttacttttccctttagcttagtgatttgggggccccaagacttattttcctttcacataaatataagtcctttattagataaacattttgcaaatattttctgtggcttgcctcttcattttcttaacagaaaatacactttttaaagagtacaagtttctaactttgatgaaagccaacataaattttttcttcatagtttgtggtttttgtgttctattttttaaaactctgcctagctcaaggtcacaaagattttctcctggtttttttctagagggttatctaaacgtttcacaagagaaaatcctctcgtcaaattttttaacaagaattttttaaaactcctgcattccatttatctcatagtcattaagttttattccccttgtttctttcaaattcaatgctgcacattaccatgcactatttaagttacagtcttctgttgtttttttttttttgagacggagtttcgctcttgttgcccaggctggagtgcaatggcaccatctcggctcaccgcaacctccaccttccaggttcaagcgattctcctgcctcggcctcccaagtagctgggattataggcatgcgtcaccacgcccagctaattttgtatttttagtagagacggggtttctccatgttggtcaggctggtctcgaactcccgacctcaggtgattcgcccacctcagcctccctaagtgctgggattacaggcgtgagccaccatgcctggccccagttatagtctatttctgaatttggaaagattttaatattttaacagatttttcctctcttcaatctagtaaatggaatgcttaagtttagccaaggttttagtccctcacttctctccaaatccacataagacctctgcacccctgatactggttcttaaaacaacaactaaattccacaacccagaacatgcaccttgaagttaagccagggacaataaactagttacccttctggctttaacgagagtcttttataagatcatgcccaccttactgagtcactctaacctgtgatgagactggaaaatgttgtcctataatcactcactggttaaattaaaatttaggcttataaaggttaagctaaccaagacaaaagtaattctgcatttcttaattcagtttggattctctctattgcaccattctctctaaaacaagccagagttcttcagacccgtatttctttttgtatagtatacacaaaggcatagcttagattcagctgtccctggagttgtttgccattcattctcagcacagtttagagaaagcaggaaaaagggattcaaagctaatgttgagtataacagggaaaacaagaagtgagaatttaccattgctcattttgtaacctcatggggagaaaaacaaaagagaaaactggctcatccatgtcactgtcccattcttaaccctaaatctagaaaatactagcttcagtttcctcttccctcctatcttgatgtgttttctatatacaaaactgactctgctatgcctgagccacagaggacaggcccccatgttcccatctcatggcagcttttatgcttaggtgactttggaccactgaatcttggctataacaggaagattttaaaagtaattctttgaacctgacaagccgtctccctcaataagtctaggaagctattattccattaactgcgcctgaagtggcaggcacacagccagatctgcagcccagtcgggtggaactggaatggtcacacgtatacttaaaagctaactctgcctctactaccatccattactttcaattctgtgcttatttttaaggaaaataaattatttatataattgaaaggaaaaacaatgttaattaaatgagcattttgtagttaagattccaagaagaaaaactcaactagccacagaaatggcaccctaagatagctggatttgaaggagaaactcaacacttacctattcaaaacaaaatttctgttgacctaataatcagttttaccaaagaaaggtctattaatttcttcaaatgcatattaagaagcgaccacatgccaagcaatatgttggaccctaaagattccagaatgagtaaaatattctcaacactttagaaacataaaagcttagtaaagaagacagacaaataaataattacgtagttatacttccgtgtagtaaaatctatgaggtgagcatagagggtatggatggataccttaatcaagatcagctcttagcttctcaggaaagttcacatcaccctcctggaagcaaagtcaactcttccatagagttaacaatgctttgggggtcaaggaatacaaaacactacctatgaagtattacttattctcagggtcaatgactctcttcaacactcgtcagaggggattcttggaccacatacatagcacagaaaaagcactcactggaaataccaacttatttatcaaaattatacacgatctggtcgggcacagtgactcatgcctataatcccagcactttgggaggccgaggcgggcagatcacctgaggtcagaatttcgagaccagcctggccaacatggtgaaatcccatctctactaaaaatacaaaaattagccaggcgtggtggcaggcgcctgtaatcccagctactcgggaggctgaggccggagaatagtttgaacccaggaggcagaagtggcagtgagccaaaatggtgccattgcactccagcctgggtgacaagagcgaaactccattttaaaaaaaaaagaggccgggcacagtggatcacaccggtaatcccagcactttgggaggccaaggtgggcggattacgaggtcaggagatcgagaccaccctggctaaaatggtgaaatcccatctctactaaaaatacaaaaaatggccgggcacagtggctcacacctgtaatcccagcactttgggaggcccaggcaggtgggtcacaaggtcaggagatcgagaccttcctggctaacatgtgaaaccccgtctctactaaaaatacaaaaaattagctgggtgtggtggtgggcgcctgtagtcccagctacttgggaggctgaggcaggagaaaggtgtgaacccaggaggcggagcttgcagtgagccgagatcgcgccactgcactccagcctgggcgacagagtgagattcgtctcaaaaaaaaaaaaaaattagacgggtatggtggcgggcgcctatagtcccagctacttgggaggctgaggcgggagaatggcgtgaacccgggaggcggagcttgcagtgagccgagatggcgccactgcactccagcctgggcgacagagtgagaccttcgcctcagaaaaaaaaaaaaaaaaagaaattacacatgatctaactggaatgtggtattctagattcagtttgggtatagaaaaaggaaattagtggagaaacttgtgaaatccaaataaagtctatagtttagtaatagtattgtaccaatgttaatttcttagatgtgacagtatgtgccatggttatgtaagaagttaacattaggagacaccggtgaaaggtatacaggaatactctgtactatctttgcaacttttttataaatttaaaattattccacaatttaaaacaatttaattacagatggtgctcccctttacattctcactcccccttagaattctaatcatgtctccctaatcattgccccaattcaggtaatgccagcctaaaactttttaaatatcttttttaacccctttctatgaactgtttgcacagcccacctgggatttcttctttaccaagacatgaaaaactagatcacacttgggaagttttaactgttttctgttcctaataggtttaccatatataccgggggtaccttgaatttgaacttcccaaagcggacaagagaggggttaaaataacatgctctgggtctctggataaaagcaaggggacattacagaaaatatgttgtatattaataaattatctaatctctggccaaaaagtacaatatatagaaaatcaattaacagatgttaactattggcatctcaacagtaacaagctgcactgaaataaatgccttcgctctgaaaaacatgatgcaaattgctcaactattcaagataacaaaaactcataaaatcatatggaaccgttcaattagactaaatgacaaaacatgtatctaccatgactatttagtttctaatagctaagtgaatacccatctttctctataaaccctatcttgtagaacagtcttcaaaagagccaccaggaaaacatcactatggtgctgtaacaccatatcaacagctcaggcatgcgtgtgtgtacacacacatacatacacacaaactgcaataaggttaaacaacctcaaaagtttgaaaactactatatgaaagaacattagtgaaggctaagcattcagaacccttcaaagaaaaagaaaccaaagaaaaataactgaaatttaaacccaagttagttaatagctaaagtcatttaaaaggtaaaacggtcaggcacagtggctcatgcctcttctcccagctactcaggaagctgaggtgggaggatggcttgaggccaggagttcaagatcagcctgggcaacatagcaagatctaataaataataaataaaaggtaaaatgatacactagagtccattaaggtcataaaatctgatctattacatggtactaatatgttgatagtattaaataaatattacacaacagtactctgacctggaccacttacagaaagatgaacaagaagagtaattcctctaaaatatttcaactcccacatctctattcagccaccaaccatactttacctatttacaagtctttctgtaatacaggactgtggtgagattgcccaggacagaatgggccctcaataaatgctttctgaatgaatgaccaagcggcagtaatctatctctgaggtattcttacaaaccaattcaatatcaagacctcagaagcagaacatgctgtatgccatgctaccacatttaggggcaggcaagttaattgaaaaataattaacagcgactaatgtttgttgggagaaaaaaagtcctatcatgtaagtcagaaaaataaatgtaaaaactataacttgaaaatggacaaaaaagtgaatctacttataactttctaacattgaaatacaagatgttctttaaggagtctttcattatccagaataattttacaaagaaatttgataccaacttaaattagtaagttagaccaattagtgaatggaatgaagtccaagcccaattatgtgttcaaactgtgtgtccaatgccttgggtgattttttctcttcaagactgcagaaaaatgcaaaacaaccctcttgactgctgagaaggactaaaatcatttcttttcctcacaagtatgtgcccaaaagcaattactttctgctcccatccatcacaaatcaacactacctcccagcttcgcatcccccactttccatccccatcaaagaatgctgtagagtatctgaccactttcatttcacgctataagaacctcagattgcaataaaattacaatgcaacaaaaacaaatttttctaagtatgttcttatcccccatggtgttcctacactaatttagctccctattaggtattaacaatcaaggaaatcagaacactctcaatagaggttacaatagaaattacaaatggcctttttttaagttgttgttgttcatggattccaaaattcaaagtacacattaccagaagagcgtttttctgtcagtgcctaaatttaaatgcaaattactatttaatgatatgcaattttccctctgaacctatatataatactaatgagtcaaatgtttaagaagaataactgaccatgttattttagcttttagacaataaaaagcttattgtctaatcaccaagagatacatcaaaaaactggttgctattagctctacacatgaatggcagcttgacagagacaagctgctccagaaagattaggaacttctagtgaccacaaatggggtaaagcagaaggcacatacagtatctgtagctaccatttctacatcaaaaattcagtgcccacagatatgtaaactattaagccatctaaatgaatgtgtgcctgaaagagaaaggagaagcagaaaaagtttacacccaaatcaacagaagaaatcaccctgcgattgagcatcccaggacctgaaaacttaatgttttgaggtttatgaacacgttcaagttccagtgcaactatgttaaaataaaattgggctggtgccaggcacggtggctcacgcctgtaatcccagcactttgggaggccaaggtgggcggatcacctgaggtcgggagttcaagaccagtctgaccaacatggagaaaccccgtctctactaaaaatataaaatcagccaggcgtgttggcgcacgcctgtaatcccagctactcaggaggctgaggcaggagaatcgcttaaacctgggaggtggaggttgcagtgagccgagattgcgccattgcactccagcctgggtaacaagagcgaaactaactccgtctcaaaaaaaaaaaaaaaaaattggggcttggcacagtggctcacgtctgtaatcccagaactttgggaggccgaggtgggcagatcacctgaggtcaggagtttgagaccagccttgccaacatggtgaaacccatctctattaaaaatacaaaaattagcaaggtatggtggcacacacatgcctgcagtcccagctactcgggaggctgaggcaggagaattgcttgaacctgggagggggaggttgctgtgagccgagattgcgccactgcactccaacctgggcagcagagggaggctctgtctcaaaaataaaataaaataaaataaaataaaattggcataaaattccaaccctgccacacatcctcaagttggaagacacacaatggtaacaacagaaaacactctgagtagtctggtttacactcttctagggacctcgcatgttaactatgaataaacataagtcctgataacatcccaataaaagagtgctactatgattatctccattttacagataaagaaactgagatgcagatagattaactcacccaatgtcatggcgagttataaggcagagcaaggattttaaccccatcagtcagactccaaagttcgtgttaaacaataaacgtgttttcatcataagggttatacaatggtcaccttcttttttaaacctgataacatattttacttccaactctaggatagcatcatgcaataagaaaagtatgacagaggtacccattccgttcccagcttgatcagtagctggagaatggaagacaaagtgcaaaaaaaaaaaaaaaaaaaaaaaaaaaaagaaaaaaaaagaaagaaagaaagaaagaaaaagaaaaaaagaaatacaagtacagactttggaatcacgagactcaaacagacccctgaacaaagtctggggctcaatttccccatatgtaaaataaaagaatttatgttattgagaaggtcaaagaaggtaatatgaataaagtgacaagtacagtatacaggatgggggttttcatttaaagtttacagacacccagagggtccacggatgggcttcagagtccaccaatctcattaagtgtattacaaactgtatgtgtgcccattttttaaagaattgttcctggctttccacaaactttcaagaaataagttatctccaaaaagttaagaaccactggaatacatagcaggtactcaaagaaaaaagctacctttcgctccttgttctcacaaattctccctttttacttaaagatgacacaccaaggcttcacaataaatgtgcattgtatctcaccattttcttggcttgggtaagtagtaacatatgcaagcttatgccccaattctctagcgatagtctaggccctcaaacactgcttcatttctctcttcaccgagaggagtacacggtatatactcgagaacaatcatccacctagctgcacaaagcaccatatcggctaggaaaaccaaataggaaccacagcctcagggctggaccatagacaccggataccccaacgctacagggtgaggagaatgtgttcccccaaactactgggcaaaccaggagtctgaacccccctacccttttcctccctctctctctggaactctggtaaaggcaggtcttctgggctctgcctaaggctggagagaaacgttacccgagccgggggttgcagcgcgacgaagttccacctccgctgtcctgggaaggggcggcagcactcagcagaagacgggctccccactctcccaccaacagaccccagagttggtctccacccggcctgggaaccggctcgggggattgccctttccccaaggagtttccgcttccgggctatcctttgccggaagcagtatgtgaatgacgtagaagtattgcgccgttggtgattacggaagaaccaggagtttggcgtgaccatggtgagagaagacggtccaagaagggacgttatcaggccactttttgggtggagaaggaggtagtcagaccgtggccaaatttccttcacattatcctagcatattttcattctggtcttagctcttaaacttctccaagcggtgactgttatgctttacagagtggggaagagggtctgggttatttgaggcaagaagggaaggcaatagacaagagaaaagaagagactttaaaagatgccgtgtgtttccaacttttttaattctaaaatttctgtttcaaggggaagcaaaagaaaacaaggaagtatgcgaccatgaagcgaatgcttagtctcagagatcagaggctgtgagtgtctggaatcaactgcccagggatattctaataagagtctagagaggataagtagtaaaaatgtttgttgttattattttgttttttgcttattatcgtgtcttagatttatatagcatgagatagccagtgtttaacagtaatttagctgctgagcgatcacactgggaaaggcgatgggaattaaacatttcttaagtgttcactttttctaccgttatatgctttgtctgccatatcgcatttaaacctcatgtcagttcggtgaagtccgtatagttctctttatgtttttaccattacactactacattcccctggggtggggcgaggggagtgtttcttgttgaaagatggcaaggttagagaccttgtttgtctggcgtttccagtgcctggtactcaaatatttttgtcagagaaaatgggaaaactccaagatatctccattttataagtcttactaatataagaatccaaatcactgtggaagaagaaagtgaagtgaaattccctagtatgaagaggatcaaagcggtgtccctgcttaagtgtagaataagcatagctattaaataaagactgatcttcactgagtttaagagtctcagaaagccgggcgcagtggctcacgcctgtaatcccagcactttgggaggctgaggcgggtggatcacctgaggtgaggagttcaaaaccagcctggccaacacggtgaaaccctgtctccactaaaaatacaaaaaagagtctcagaataagagaatagtcgttaaaaccttcagaattattattctcagcctttagtgtggatgtattgtgtaatttttaggaatgacactccattaataataatttctttctagttaagggttaagttctgtatatgcgtttttacattttagccctttataagaagcatatggggtaatacttttcccccaaaagttaaagcatctgaatcttcagaagataactgtcacccttttacccattgcttggaagtggattgtgatccttgatgtgagagattctgactaaaaaataaatatagtataatcagcttttatttactcattaacaattcttatgcattattggcattactggttaattctgatacttccaggtactgtgctttgcactagagttatttgctcagaaagagtatgctgatattaacatgaggatatcacaaagtaggatttcttcagtagaccaaaaaaaaaaaaaaatggaactttagatttttgagattttaattgctgtggtttttcttctcccttggatttaatttacctttttcttcctagtaaagaaaaggatagattaaaacctaaaaagaaagaaaagaaggatcccagcgcattaaaggaaagagaagtgtgagtaatcaaacgtttgaagttttcctttaaaaccatagacctcttagaaatccaggctttccctgagctggtttgctaacttatttgttagtaagtctagcacaactatgtagatgaaagtcatatcgatgagcatatatcaattctagtggtttgaaggttttgggattttatggagcagtaaaatttcccctaaaatcctggagatattatctaggattattaactttttctttgccagggatcttttaagagacataagtgccattgtttaacacaccagcagttcataaaagagagactgtatcaccaaaaaatatttaaaatatattttcagaataaagatatttatataaagatatgacctttatataaagatataaaggtatttcattccttttaagtaagtacatttaactttatgaaaactttaccacattttccttatttttctaatttttccctggattggtaatggacatattatcacaggtagatactgatccatggcctagcatttggaatcactgtcatattcaacccagacaacttgggctagatgtgatacaggtcctgctgtagtatataatcctaacactagacaaactgttctctatcacattccataacagcagttttagaatcctttaagaatgacaaacgtgttgttgtatcattctaatcacgataactgtattctacctccctgtgcccatggtgattctacttttgctagaggaagagctagattggataattgctttttttgtttgtttgtttttgataattgcttttttaaagttggtgacaaaggttgccaggggagctgagattaagataatgatattactttcttccttgccttcctttttaggatttatttccaatgaacatggacaaaagagtttacagcaaacagtcccaagcagacttcttttttgtttttgttaatactagggtatcaatgtaaatttttctttgttcttgttttctttttccttcagtccccaacacccttcctgcttatttttccaatataatacacagctgggcccaccttaccacatcctcgttgataccaactttatcaacttttccataaaagccaaactggacttagtgcagtcaatgatggactgtctgtatgccaagtgtgagtatcatacttttatgtttccgtgacatttgttcagaataattatatttatacaaatacatgaaaggagggagatggggttcttgttaactgaattgctggccatttaatttacagtggtcaccatagcagtgaccatgtttaatgaattgaagtataatgcaaacttgactggaaaaaattaaactttcacaattcagaaaacacttagaatgcttcgagtatcattatggacatcaattttgaacataggggaattttctgttttagaattctagattttaaaattctagataaatgaaaaatctatttttcagtatctatattcttttatgttaacaaggatatgttctcccttttgccccagtgttgaaacactaaataagacattctgccatttatgatcacagccctagaagttagatagatgatggtcaattcctaagtttattcagtttggtatttattcgtagtacagaggatctgaggtagtttatttacacctaggtatgcaatttaccattaatagatttcccttgtgtatttgtatatcccctcctttaaatgatcttccttcactaccatgaacaggaaaaagaaaagtaaggccatctatgaagcctatcatagtaagatctgtcccatttgtagcgggtttatatttatatatttttcagtcacccggttagaggtacgaatgaaaattagacttaaactttgccatagaggataaattactggaatcaaagggaaaaatttgtacctccctttttaagttttaaaggctactatataatgaacaacagttgcagagtgatagaaatggtaaatgttgtttactgatttattaaaatgagcaagatgagaagatggggttaaggaatgtgtgaaggggtaagaaagcagattctttagatgcccaaaaattaattaagaatggctgcagccgggcgcagtggctcatacctgtaatcccagcactcgcggtggctcacgcctgtaatgccagcactttgggaggccaaagcaggcggatcatgaggtcgagatcgagaccattctggccaacaaggtgaaaccccatatctactaaaaatacaaaaattagctgggcgtggtggcacgtgactgtagtcccagctacttgggaggctgaggcaggagaatcgctggaacctgggaggtggagcttgcagtgagccgagattgtgccactgcactccagcctggcaagagaaactccatctaaaaaaaaaaaagaatggctgcatacatttattagctgcatacgtttattaagatgtgaaggtagccatcagatgagaaaaaaatggagctaatggaataaaatagtcttctctacagatcagaattgattgggtggcaatggtcaggggaccattgttttttcatataggcctttctgtattactttttaaagctatatacataaacttttgaaataaatcttttagaaataatctaaagttgaggtgctaccaggcctctaagaatgaggcttgggtgaccccatatgggggaagacactaaacttggtagtctctttgtatttcccatggtatttctaattgagctgcttctccaggaatgctgtgacctacttatcaatgaaacggatagagggtcaaagcatggccctttgcttccttgatgaattgcttccttgactctatacctccaccagtaatatctagatagtgactgttagagctttaggcaggatagctttagtcttatggctttctttaaatatgtatacttttttttttgagacagggtcttgctttgtcacccaggctggagtgcgttggcgtgatctcagctcactgcgacctccgcctcccaggttcaagcagttcttctgcctcagccaccccagtagctaggacatgccaccacgcctatctaatttttgtatttttcgtagaggcgggtttcaccatattggtcaggctggtctcaaactcctgacctcaggtgatccacccacctcggcctcccgaagtgctgggattgcaggcgtgagccaccgtgcctggccttgcttgcctttatacttaaaggaaggcctttctcttcctcttaccttgaaaaggcctgtttgatctttacatggttcctggtctcttctatttccactttatagtccaacaaggaaggatagtttgcttcccattggctttctcttctgcctatgaatcctgaggctgttactttccctttccttgtagtggttttcctgagcctgcttccctacttcagttgcaagcctttgctcacttcactgctacatggctctgaaattggtcctcttaaagaacacattgccttgtttcatgatctcagtattaaaatatatatatatattgagacaaagtttcactctgtggcccgggctggagtacagtggggtgatctctgctcactgcaacctctgcctcccaggttcaagtgattctcctgcctcagcctcccgagtagctgggattataggtgcatgctgccactcccagctaatttttgtgtaaagtagagacggggtttctctatgttggccaggttggtatcgaactcctgacctcaagcattccgcccactttggcctcccaaagtgctgggattataggcatgagccaccacgcctggccagtattaatatacttctaaaaaattctagcataaaaaaatggaagttgaagcctgggcaacataacgagaccccatgtctacacataatttaaaaattagccagggggccaggtgcggtggttcacacctgtaatcctagtgcttttcaggagttcgagatcagcccggccaacatggtgaaaccccatctctactaaaaatacaaaaattagccaggcgcagcaccatgtgcctgtaatcccagttacctgtgaggctgagggaagagaatctctggaacctgggaggcagaggctacagtgagccgagatcgtgccactgcactccagcctgggtgagagagcgagactctgtctcaaaaaaaaaaaaaaaaaaaaaaagcatgcatcgtggcatgcacctgtggtcctagctacagatgctcaggtgggaggatcacttgagcctgggaggctgaggctacagtgaattgtgattatgccactacactccagcccaggcaacagagcaagaccctgtctttaaaaaaaaaaaaaagaagaagaagaagaaaagaaagttgggctgggcgagatcttcaccccgtagtcccagcagtttgggaggccgaggtgggaggagttctgggcttgagctcaggagttcaagaccagcctgggcaacatggtgtgaccgcatctctacaaaaaaaattttttttaaatcaagctgggcatggtggctcatgcctgtaatcccaacgctttgggaggccaaggtgggtggattgcttgagcccaggagtttgagaccagcctggccaacatggcaaaaccctatctctaccaaaagaaaccacaaaaattagctgagcatggtggagcatgtctatggtcccagctgcttgggaggctgaggtgggaggatcacttaagcctgggaggtcgaggctgcactgagctatgtccatgtcactgccctccagcctgggtgacggaacaagaacctgtctcaaaagggggaaaaaaaggaagttgcttataatgcatttcctcaaaggagcaattataaaaattcataaatctgtgtgagatggagggttacttttatttattaatgaaaatggcctgtaatcccagcactttgggaggccgaagcacgcggactacctgaggtctggagttcaagaccagcatggccaacatggcaaaactctgtctctactaaaaatccaaaaaaaattagccgggcgtggtggcaggtccctataattccagctactcgggaggctgatgcaggaaaatcgcttgaaccccagaggcagaaattgcagtgagccaagatcgtgccattgcaagagcgaaactccgtctcaaaaaaataaaaaaagaaaatggatcctgtattattttttgctttataaaacagatttactgaaatataattgactccctttacaactatacaattcatccctttaaagtgtacagttcagtgacttctagtggattcacagagttgtgcatcatccatcaccatagtcaattttagaacttccattatcccaggaagaaacctggagacccttagccatcaccctgcaaccctcaccattctctctatttctaggcaaccactaatctactttctgtttctataaatttccctattctggacatttcataaaaatagaatcttataatatttggtcctttttcatttaacgtactgttttcaaggatcatttatattacagtttgtatcagtacttcatttctttttattactaaataatattccactgtatggatagatcacattttaatcatttctacttgctttttacattgaactatatattttgaacatttttccatggcatgtatatataaatgggcctcattcttttattttgagtcaaggtcttgctatgtcatccaagctggaatgcagtggtctgagccaatagcttacagcagcctcaacctccaggtctcaagtgatcctgcagccacagcctcccaagtagctgagactactggaaagagccaccatgcctggctattttatttatttatgttttgtagaaacaaggtatcaatcatgttgcccaagtttttggggtttgtttttttttttttttttgagacaggctgtcactctgtcacccaggctggagtgcagtggtgtaatctcagctcactacagcctctgcctcccgggttcaagcaattctcatgcctcagcctcccagtagccgggattgcaggtgtgttccaccacacccacctaattttttttttttttttttgagacagagcctcactctgttacccgggttggagtgcagtggtgcaatatcggctcactgcaacctctgcctccaggcttcaagtgattctcctgcctcagcctcctgagtatctgggactacaggcatgtgccaccacgcccagctaatttttttgtatttttagtagagatgaggtttcaccatgttgaccagactggtcttgaactcctgacctcaggtgacctgcctgccttggcctcccaaagtgctgagattacgggcatgagccaccacacccagccctaatttttatatttttagtagagatggggttttgccatgttggccaggaattcttttttaaagttatgtatggccgggcacggtggctcacgcctataatcccatcattttgggagttcgaggcaggtggattgcttcaggtcaggagttcgaaaccagcctgaccaacatggtgaaaccttgtctttactaaaactacaaaaattagctgggcgtggtggagggcgcctgtaatcccagctacttgggaggctgaggcaggagaatcgcttgaacctgggaggcagagattacgccactgcactccagcctgggcaacaaagtgagacttcaaaaaaaaataaagaatgaataaagttacatactataattgcttctcagccttttggctaagatcaggtgtaaagttacatactattctattgtttaaatacataattttttaaacccagtatcttattaggtattttggttatttccaggttctacccaattaacaagtctgtagtaaatatccttatgaatatgtctccctaagagtgtatttctttaggatacattgtctggaagctgtattatgtatcaagggatttgtgtatttttaataggtattgcaaatttgccctcaaatagttgtaccaatgtatatacctacaaacttagtatgagaatacttgtttcctcaatattgggtattttcttttttttttttttttttgagatggagtttcactcttgtcactcaggctagagtgcaatggcacgatcttggctcattgcaacctccatctgctgggttgaactgatcctcctgcctcagcctcccaagtaactgggattacaggtgcccaacaccatgcccagctattttttttatttttagtagagacgggtttcaccatgttggccaggctggtctcgaactcctgacctcaggtgatccgcctgcctcagcctcccaaagtgctgggattataggcgtgagccactacgcccggccaatattggatattttcatctgtttaatctttgccactcttctaggtgccactcttcccagtctttggcccaatagactccgttcaaatgttggctttaccatttgctatctatttagttaacttctttgtgtctcaggttcctcacctataaaatagggatgatgatttttttttaaactattatatggctttctgtttgatagttgtcaaacagaagtttttaaaatttttatgtgatcagatttacattatctggctaatttcatggtttcttgtggttcacatttaaattttatttcatctgagccaggcacagtggctcacacctgtaatcccagcactttgggagcccaagacaggaggaatgattgatcccaggagttcaagacagcctgggcaacatggcaaagccccatctctacaaaaaaaaaatgtttttttttaattagctgggcatagtggtgcgtacctgtggtcctcgctactcgggaggctgaggtgggagaatcattagaacccaggaggataactagaacccaggagtttgaggctgcagtgagttgagatcgtgccactgcgctccagcctgggcaacagagcaagactctgtctcaaaaaaataataaaaataaataatttttttcccatcaggaacttacattaatataaaaataatgacagagttcagcttagttttttttccccagatatgtttataacagggaatctgcagtttggggttgggacaatcttagtttcttagggttttcttctactctagttcttcttgtatatttcagtgtgctaattctgctgtcattgcaaaagtgtcctgggtctttttaaaactctgagcagggatataattcagagataatttcgttacaagttctgttcttaatgtgaatttttttccctggcaggtatcccatgtataaccgattgtgtaatggctgaaattgagaaattggggcagaagtatcgagtggctctaaggtaggaaggaggtaaactagatctgttctagattggtatactgaagattcatctgtttgttgtttaaagatttcttggccagttagttgtgaaaatcatacaaaactatttatcatttttgggggggttgttttggtctttctctcacacaaaaatcagttccagttagagtgtctaaacttttaatagaaaatacagagaatatcttgtccgggctcggtggcctgtaatcccagcactttgggaggccgaggcaggcagatcacctgaggtcaggagtccgagaccagcctgaccaacatggagaaaccctatctcttctaaaaatacaaaattagccggctgtggtggcaggtgcctgtaatcccagctacttgggaggcttaagcaggagaatcgcttgaacctaggaggcggaggttgcagtgagcctacatcacgccattgcactccagcctgggcaacaagagcaaaactctgtctcaaaaaaaaaaaaaaagagaaaatacagagaatatcttaatgaaattgaatatttgtgtatagcaaaagatatcattaacaaagtaaacagacatacataatcaacaaagggcttattttcaaaatgcataaagaacttcacatctgtaagaaaaacataattcttaaattcacagtgagttgtcatttagtgcccattagattggcaaaaattttttaatgagcttgacaatgccaagaatagttaagaccatgaagcaatgggaattctcatactgaactactaagggtataaattggtcatcactttggagggcaacttgacaatatctggtaaaatccaggttgttcatactcttacaacacagtcttttaacctggagatcacattctacaggtaattaaattggtttaaaggatcacaatgcctggtgggtttggggggttttttgtgttttgttttgttctgtttttgaagcaaggtgttgctctgtcacccaggctggagtgcagtggcacaatcagggctcactgcagcctcgacctcctgggcttaagcagtcctcctgcctcagcaccctcaagtagctgggactacaggcatgcaacacctcacatggccagttttttaaaatttcagtagagatgaggtctcaccatgttgcccaggctagtcttgaactcctgggctcaagtgatcctcccaccttggcctctcaaagtgctgggattataggcatgagccaccacacccaacccccgagtatattttttagtgtaacagaagaaactataggctgggcacggtggctcatgcctgtaatcccaacaccttgggaggctgaggcaagtggattgtttcagcctaggatttccagtccagcctgggcatcatggtgaaaccctgtctccacaaaaagtaaaaaaattaaccaggtgtggtggcatacacctgtagtctcagctattcgggaggctgaggtgggaagattgcttgagcccaggaggcagaggtagcagtgagctgagatggtgccactgcactttagcctgggtgatagagtgagactctgtctcaaaaaaaaaagaaagaaattataaaatattagcatgaatatgtagaaaaaattgggtactgcttcacaaaacttttttcgctgttatatgtgtgtatatgtatatgtggtatatgtgtgcatactgtacgctagataaaatctatctcgtgctatgggttctggtaaaaaaaaaaagaaagaaaaagattgctatagagaagttcagctactattggagtcaagtattggcatcttcttatgtacgtaatagcaaaaaattgcagacagccagaagaaatggcttttcttaagccataaaggatggccaggcatggtggctcatgcctgtaatcccagaactttgggaggccgaggcaggcagatcatttgaggtcaggagtgatcctcaacatggtgaaaccctgtctctactaaaatatgaaaattagccaggcatggtggcgggtgcccatattcccagctactctggaggctgaggcaggagaatcatttgagcccaggaggcggaggtttcagtgagctgaggtcatgccactgtactccagcctgggctacaaagcaagaccctgtctccaaaaaaaaaaaaaaaaaaaaaaaaaaaaactgggtacagaagctcacgtataattcccaacacttcgtgaggccaagtggggaggatcgctggagcccaggagtttgagaccagcctggccaacataatgagaccctggctctacaaaactttaaaaatttgccgggcggccagccaggcgcagtggctcacgcctgtaatcccagcactttgggaggccgaggcgggtggatcacgaggtcaggagatcgagaccatcctggctaacacggtgaaaccctgtctctactaaaaatacaaaaaaattagccaagcgtggtagtgggcgcctggtagtcccagctgctggggaggctgaggcaggagaatagcatgaacccgggaggcggagcttgcagtgagccgagatcgcgccactgcactccagcctgggtgacagagcgagactccatctcaaaaaaaaaaaaaagaaaattagccaggcatggtggcttgtgcctctacggagttcaaggttgcagtgagctatgatcacaccactccactccagccccaaaaacaaagtgagaccttgtctctttaaaaaagaaagaaaagaatagataagctgtggaatgctcatgaataaaatactatacaagagtgaagatgagtgaactagagttatgcgccaatgtggataaatctcaaaaacaatataaactataaaaaaaaaacaacagcagtcaggcactgtggctcactcctgtaatcccagcagtattgggagcccgaagcaggaggattccttgagcccaggagtttgagaccagcctgggcaacatagtgagacccaatgtctatgaaacattttaaaattagccaggcatggtggcatgtacttgtattcccagctacttgggaggctgaggtaggaggattgcttgagccagggaggttcgagatcataccactgcattctagcctgggagacagcgagaccctgtctcaaaaaaaaagaaaaagaacaatgctgagcactgttaacgcacatctgtagttccagttacttgggaggctgaggcagaaggatcacctgagcctaggagtttcaagccagcctggacaacaagacccccatctctttttttttttttttattatactttaagttttagggtacatgtgcacaatgtgcaggttagttacatatgtatacatgtgccatgctggtgcgctgcacccactaactcgtcatctagcattaggtatatctcgcaatgctatccctccctcctccccccaccccacaacaggccccagagtgtgatgttccccttcctgtgtccatgtgttctcattgttcagttcccacctatgagtgagaatatgcggtgtttggttttttgttcttgtgatagtttactgagaatgatgatttccaatttcatccatgtccctacaaaggacgtgaactcatcattttttatggctgcatagtattccatggtgtatatgtgccacattttcttaatccagtctatcattgttggacatttgggttggttccaagtctttactattgtgaataatgccacaataaacatacatgtgcatgtgcctttatagcagcatgatttatagtcctttgggtatatatccagtaatgggatggctgggtcaaatggtatttctagttctagatccctgaggaatcaccacactgacttccacaatggttgaactagtttacagtcctgccaacagtgtaaaagtgttcctatttctccacatcctctccagcacctgttgtttcctgactttttaatgattgccattctaactggtgtgagatggtatctcattgtggttttgatttgcatttctctgatggccagtgatggtgagcattttttcatgtgttttttggctgcataaatgtcttcttttgagtagtgtctgttcatgtccttcgcccactttttgatggggttgtttgtttttttcttgtaaatttgtttgagttcattgtagattctgaatattagccctttgtcagatgagtaggttgcgaaaattttctcccattttgtaggttgcctgttcactctgatggtagtttcttttgctgtgcagaagctcttgagtttaattagatcccatttgtcaattttggcttttgttgccattgcttttggtgttttagacatgaagtccttgcccatgcctatgtcctgaatggtaaagcctaggttttcttttagggtttttatggttttaggtctaacgtttaagtctttaatccatcttgaattgatttttgtataaagtgtaagaaagggatccagtttcagctttctacatatggctagccagttttcccagcaccatttattaaatagggaatcctttccccattgcttttctcaggtttgtcaaagatcagatagttgtagatatgcggcgttatttctgagggctctgttccgtttcattgatctatatttctgttttggtaccagtaccatgctgttttggttactgtagccttgtagtatagtttgaagtcaggtagtgtgatgcctccagctttgttcttttggcttaggattgacttggcgatgtgggctcttttttggctccatatgaactttaaagtagttttttccaattatgtgaagaaagtcattggtagcttgatggggatggtattgaatctataaattaccttgggcagtatggccattttcacgatattgattcttcctatccatgagcatggaatgttcttccatttgtttgtgtcctcttttatttcattgagcagtggtttgtaattctccttgaagaggtccttcacatcccttgtaagttggattcctaggtattttattctctttgaagcaattgtgaatgggagttcactcatgatttggctctctgtttgtctgttgttggtgtataagaatgcttgtgattttttacattgattttgtatcctgagactttgctgaagttgcttatcagcttaaggagattttgggctgagacaatggggttttctagatatacaatcatgtcgtctgcaaacggacaatttgacttcctcttttcctaattgaataccctttatttccttctcctgcctaattgccctggccagaacttccaacactatgttgaataggagtggtgagagagggcatccctgtcttgtgccagttttcaaagggaatgctgccagtttttgcccattcagtatgatattggctatgggtttgtcatagatagctcttattattttgaaatacgtcccatcaatacctaatttattgagagtttttagcatgaagcgatgttgacttttgccaaaggccttttctgcatctattgagataatcatgtggtttttgtctttggttctgtttatatgctggattacatttattgatttgcatatattgaaccagccttgcatcccagggatgaagcccacttgatcatggtggataagctttttgatgtgctgctggatttgattttcccgtattttattgaggatttttgcatcagtgttcatcaaggatattggtctaaaattctcttttttggttgtgtctctgcccggctttggtatcaggatgatgctggcctcataaaatgagttagggagtattccctctttttctgttgattggaatagtttcagaaggaatggtaccagttcctccttgtacctgtggtagaattcggctgtgaatccatctggtcctggactctttttggttggtaagctattgattattgccacaatttcagctcctgttattggtctattcagagattcaacttcttcctggtttagtcttgggagagtgtatgtgtcgaggaatttatccatttcttctagattttctagtttatttgcgtagaggtgtttgtagtattctctgatggtagtttgtatttctgtgggatcggtgatgatatcccctttatcattttttattgcgtctatttgattcttctgtctttttttctttattagtcttggtagcggtttatcagttttgttgatcgtttcaaaaaaccagctcctggattcattaattttttgaagggttttttgtgtctctatttccttcagtcctgctctgattttagttatttcttgacttctgctagcttttgaatgcgtttgctcttgtttttctagttcttttaattgtgatgttagggtgtcaattttcgatctttcctgctttctcttgtgggcatttagtgctataaatttccctctacacactgctttgaatgcgtcccagagattctggtatgttgtgtctttgttctcgttggtttcaaagaacatatttatttctgccttcatttcgttatgtacccagtagtcattcaggagcaggttgttcagtttccatgtagttgtgcggttttgagtgagattcttaatcctgagttctagtttgattgcactgtggtctgagagacagtttgttataatttctgttcttttatatttgctgaggagagctttacttccaagtatgtggtcaattttggaataggtgtggtgtggtgctgaaaaaaatgtatattctgttgatttggggtggagagttctgtagatgtctatgaaaaagcaagaacatatgtggagtataccatttatctaaagtctaaaaacatgcaaaccaatactgcattgtttatagatatgtgtatatgctttttttttttttttttttttttaaagacagattctcactctgtcgcccaggctggagtgcagtgatgctatcacagctcactgcagccttgacctctccggctcaagtgatcctcctgctttggcctcccaagtagctgggactacaggtgcataccactatgcatgtctgattattttttttcttttgcatggctaattttaaaaaaaaatttttttggtagagactgggcatggtggttcacgtctgtaatcctggcacttaggaaggctgtggcgggcagatcacctgaggctaggagttcaagaccagtctgaccaatgtggtgaaacctcatctctgctaaaaatacaaaaattagctgggggtggtggcaggcacctataatcccagctactagggatgctgaggcaggagaattgcttgaggctgggaggcagaggctgcaatgagccaagatcatgccactgcatccagcctaggcaacagagcaagactccatctcaaaaaggctgggtgcagtggctaacgcctgtaatcctagcactttgggaggctgaggtaggcagatcatctgaggtcgggagttctagaccagcctggctaacatggtgaaaccccgtctctcctaaaaatacaaaattagctgggcatggtggcgcatgcctgtaatcccagctactcaggaggctgaagcaggagaatcgcttgaacccgggagcagaggttgcagtgagctgggattgtgccaatgcactccagtctgggtgacagaatgagaccccatctccaaaaaaaaaaaaaatttagtagagatagggtctcactatgttgcccagctggtctcaaactcctggcctcaagtgatcttcctgctttggcctcctaaagtgctgggattgtagtcatgatcctccacacccagcctggtaatttttaaaacaataaaaataaagaatgagaggggaaaaaatagaggcaccaagtggaaacactaagtttggctgtcaagagatgcagaaatggggtgttagctggaggggggtataggtaaaaagatttttttgtcttaaggcagagaatatatgacagcatgttagtatgtttctaggaaagagctagtagagaggagacaagtgatttcaggagtaaagagataactgaaagagcatagtcctagactgttgcccacctagtttgtcagcaaccagtccatcctccctctagtgtatcctccccagcacagcctgcttagtttttccaagacagagctttgttcttatcactttgtcccccagaaatctttaatgactcctcattacctgtgtcatcacactcgtcagcctggcattggagactctttctagccccatttcattcttctctccacaaacactctgcccccagccagaaagatgtgtttactcttccccaaataccaagaaaccattttacagttggctggtgtcctatttggtaccctcacattgcttggcacattctttaatcttatttcaccccatgtcatttttttctaaatattcccaacccacattgacctagcgctgaactactgcaatatggaggagtatttgtgttgcacttggtacatatgtgctgtcttgtatttttcttcatttcagtgactcatcatcactgttaatagaaagagcatggctctcagaatcacacagagttggggtttttctttttcaaatatgtatgaaaataatacatgtttgagtgttttatggcaaacaatacaagcatatacatatagtaaaaggtaaaagtctgcctctacattcatactttgtccattctcataccccaagagtgacaactgacaaaggttaatatattttttcagacctttttctgtgcaaatgcaaatctaaataaagagtattggaaagaaggatttgtattttattaattaaatcatattatatatatatatatgcatatgccctgctttgtttattcaacagtttagtgtaggtccttccacattggtacgtacagctctacctcactttttattaataggataagggcaccaaaatgggtttaacttttacctttctaaaggatatttttattttcttcacttactataaactgtgttgagtgatcatccttctgcctatattcttgttcattgtgtttaagacaacttcttaaaagtgaaatggttaggttaaaatgggttttgtttttgaatcctggcttttcccagctgtatagctttgaatgaagtaatttaatctctctaagcctacttcctcatctgtagaatagatatataataactcaaagttttgtaatgattaaatgacccaaagcacactagctgtcagccttcattccctgccccgtgaattgtctttccagttagaggataaagttcaggaggagaacagtgccttaaaatctctgcatagatcatgttacttttattgcattaattaagactcagaaagttatccagctgattgaatgttttctttaatccacctacaggattgccaaggatccaagatttgaacgattaccatgtacacacaaaggaacctatgcagatgactgcttagtacagagagtaactcaggtattatcagttcataactgtttactttgtgcttaaaaaaaaaaaatgtaaactattatctcctgaatgttcatggtcagtaaaacatctaggaatatacattatggttaaattaaaaaaaaattgcatagcattccttcataagaagcataggtgtcttcatttacttgagaaagtggattgaaaatgtacactctaaccataatggaaagagcacaggcttggggaggagacatgggtttcacgtctcagcacctgcatttactggctgtgtgatttgggacatttaactgattctttatctcacaaatctctgtaaaatgattttaagtgagttaatgtagaacccatttatttttgatgtaggaattttgttcctcttcacgatgcctaatccaaaagtgcttcttagttaaatctgagagtctcccaagatgctgtttcacacataccctagaataagtaggtttttaattccttcattaagcaccacaaggacttctgctactgagtgcttttataagggcctctctgctgatgataatcttcatctgctctgctgaccacagagccatccttttagccacttcaccccatggggcgggtgggtggggccagtatttcccacagcacagctgacaccactctgccactttttataaaactcagtaggagagtcagacgtgacagatgtgaagcttcctataaaatagctttcacctgacagctaaatattactgcttttataactgctaggctctagtttcaggccctgaatatcctacttaggcttcctgtttcggggatagcttacctctaacatcagtaggcccagagcacacccaagccccaagatctagggaaaggagggagctatggcctccaaattaaggcactttttatctccatggagttcctcggagcattttcccaaaactaaagaattgtctgccccaagtgtgaaagtccctttcatttatgagcagaaaacagtttgcagcttgtgaaaagttttctaccttctcctcctcaagattctaaatgctgcattcagcccaggcaacttgtttattttatataacaagattaggagctcctagatcatagtaggtactcaacaaattgttatagcctgcccttcgctacttactgtgaaaatgaacgattctcagactggtcagtcgttgtgccattatccagtattcactaagcgtgctcagtgacctcagtgtgaacatcactccatgtctcttacagcataagtgttacattgtggccacagttgaccgggacctgaaaagaagaatccgtaagattcctggagttcctatcatgtacatttctaaccataggtgagaaatttcccttggagaagggaatagaaatatataattgatatcaattgaaaatgaggataagtgataaggttataaaggatttgaaagaaattattgtatcaaatgtttacatagttatatttgaagaaatgagacaaagcaagagcaagagcaaaagagagagataggatttaaggaatgaggcaaacatttaaattgttagagtaagattactggaagaaatagacgtattgttttaaataaaagcagtaatttaaatcaagctaatctttttggccagaaatacctgttttgaaagatttttttttattaacacttcatctgagaaatggaaagcttatttaaaaaaaaaaaaagctgttatccttcttggctattttttgtcagtactcagacttattttccagcttttcagcttgaggagagcacaatgtggtgggaagtctgtggactaagaagttggacttactgatctcagctcctcagttcccctcttgctgactttgtgactttgaaaaaacaatcatattgtattatagtcagcattttgctgtaaatcattcattatgatgttcccctaaattgtttccactgacaaaaaggattcacagtgggggtgagagtattgcagtctataaaggatgggtttttagatgggttctcttcccatctttcttaccggtgttgattttttgtcctgatcagatacaacattgaacggatgccagatgattatggagcccctcgattctaattcttacaagacacagttcctctgcctttcttcgaccaactttctcttgttgccagttcattacacaaaatgtagcgggatttttaaggaatcagagagactgatggagttcagggagatatttattatttaggtgcaccagcccagtcagattaacatccaaaggactgaaccctgaacagagttaagttaccttttaagcattttgtggggccgcgggggttggggggaatctgtgcagggggaagcatattacagaagcaagaaagacagttattcaattaactgagacatgcattacatcatttcttacttttcaaggaaaatcatgttttacgacttgagtttatctgtctagttaccttgcagctgcacagctagagaaacagggtatttacaatgcctgggaaaggaggagagataaggctcactagccacagaaaaacaggcagttaatttttaaaggactccagctctttctctttctcacggggaattggattttcttacatgcaactgaatttctgcttacacatttttaaatttcttttaattgcttttccaatgcaatagcatgaattattattctgttgacctatttgccttactatgagctgagggtagttcaatatgctcactcttttttttttttttcttgagatgaagttttgctctgtcaccaggctggagtgcagtggcgtgatctgggctcactgcaacccctgcctcccatccttcaagtgattctcctgcctcagcctcccgagtagctgggattacaggtacacaccaccatgctcaactaatttttcttttttgggcggggggggtggatatttttagtagagacaaatacttttgtatttttaatacagaaaagtatgcctcggcctcccaaagtgctggaattacagacatgagccactgtgcctggcctgctcactttctgatgctgcttttttgttgtttgtttgtttatttgtttgttttgagacggagtctcgctctgtcaccaggctggagtgcagtggcgcaatctcggctcattgcaacctccgcctcccaggttcaagcgattctcctgcctcagcctgcggagtagctgggactataggtgcgtgccaccacgtccagccactgatgctgttttgccactgatgctgttttgaaattgatattttgtctcataaaaactaggccaggcatggtggctcattcctgtaatcccagcactttgggaggccaaggtgggtggatcacctgaggtcaggagttggagatgagcctggacaacatggcaaaaccccacctctactaaaaatacaaaaaaaattagctgggtatggtgtcacgtgcctgtaatcccagccactggggaggctgaggcaggagaacctcttgaacccaggaggtggaggttgcagtgagctgagattgcgccactgcattccagcctgggtgacagagtgagactgtctcaaaaaaaaaaaaaaattaatgatggtcaaagggtataaaatctcagacaggaagaatatgttttatgctttttttgagttctgttgtacagtgtggtgcctatacttaataatggggtattatacatttcaaaattgatgttctcatcacagaaatgtatttgaagtattgcatatgttaactagcttgatttaactattccatattgtatccacaatttatgatatcactttgtaacccatacatttatacaattataaattgtcaatttacaataaaaaatttttgttgcgtctttttagaaatcagatattctgatgattgctcacataatttggcggtcattgttttatactgacttactcaataaacatttattaaatgtatactaggtgcttaataagagatggtcctgccctcaagacactcattatggtgggaaagaaaaacatgtaaatgaataaatgccgtaaaatagcagtgctagggtaaaagtttcagaggcatgtcatgggcacataaaggtggaatgatttttttctactggttgggatggagagggaggaaaggccagtggtcatgtggtttgagctaatcttaaaaatgaataggtgcctccccagtaaattaggaatggaagatgaagcataggaaacagtacaccatagaaaatccattaacctatgtataatcccagcactttgggagactgaggtgggcagatcacttgaggtcaggagtttgaaaccagcctggccaacatggtgaaaccccacctctactaaaaattccaaaattaactgggcgtggtggtgcaagcctgtagtcccagctacttgggaggctgaggcaggagaatcgcttgaacccgggaggcagaggttgcaacgagccgagatcacgccactgcactccagcctgggcgacagagtgaaactctgtctcaaaaacaaacaaacaaaaaacctatgtatttgtggggatttggtatattattaaggtggtatttcgtttctgtgggaaaaggaaatttcattaacaggccaaatagtctggagtcattctgttagtgttagaatactaattccaccagttaatatctgtatgagttggacaaaccatataaccatctgttgccttccttgtttcctctttaaagtgtttaatccgcaaaacaaacctgataaagtgagattaaattgaatagtacctggcccaagtaagtgttcttcagtaaatgttagtgattattacacaatggcaaggtggctatccatttgaaaaaaaattaggccgggcgtggtggctcacacctgtaatcccaacactttgggaggccaaggtgggcggatcacctgaggtcaggagcccaagaccagcctgaccaacatggagaaaccccatctctactaaaaatacaaaaaaacaattaggcaggcatggtggcaaatgcctgtattcccagctactctggaggctgaggcaggagaacgcttgaacctgggagatggaggttgtgatgagccgagatcatgccattgcactcattccagcctgggcaacaagagtgaaactctgtctcaaaaaaaaaaaaaaaaaaagagagagagaaaaaaattagtttcctacttcacatgattcataaaaatatttcaagtggatcaaagacctaaattttttttttttttgagacagtttctcactctgtcacccaggctgcagtgcgttggcacaatcatgactcactgcagccttgaccttcccaggccctgatgatccaccccagcctctcaagtagctgggatttttgtatttcttacagagatgggattttgccttattgcccaccttggccttctaaagtattgggattatgggcatgagccactgcacccaccctaaacttatttctaagctatggaagcattaggaaaataaatgtaaagaaaaacgtgtttatcacctttggatagaattcttaagcagaatctaaaaagattgaagagtttgaatatattaaaattatagatttctgtgcaagacactcccctcccctaaaaaacaagtgactgatgagattttccaatacatgtaacaagggtttagagaaatgagtactgatgtcatgctgacagaagtgcaaatatttatggccattttttacagctgttgacaagatccactaaaataaaaattgcagatatcctgtgagcccaattctatttttttggtaactttatagtatcatacaggtgattcactttaaaatacctctgcatggacaacgtgatatgtatgcgaagaaacattcacatgtgtacaaggaagcaggtagaaggatgtttactgcactgctgcttataaaagagaaaaaacaaactaaatgtccatcaaaaggatcttaactgtggccgggcatggtgactcacacctgtaatcctagcactttggaaggctgaggtgggtggattgcctgacctcaggagttcaagaccaccctgggcaacatggcgaaaacctgtctctactaaaataaaaaaattagctgagtgtggtggtgcgcacctgtagtcccagctactcaggaggctgaggcacaagaattgcttgaacccaggagacagaggttgcggtgagctgagatcacgccactgcactccagcctggcgacagagcgcgactccgtctcaaaaaaaaaaaaaaaaaaaaagcggtggggggtcttaactatggaatgtcatgaacatctatctacaaaaaatgaggtaggtttaaaatgggcaaaggacttaaacatttctccaaagaagatatacacgtggccaagaaacatgcaaaaagatggtcaatatcactaatcattagggaaatgcaaattaaaaccacaatgatatactacctcacaccccttagccactattaaaagaaagaagcaatagttattaaaaagtatttgtgaggatatgtagaaattgtaacccttagctgtgcactgcacatgcccatagttccagctactctgaaggctgaggtgagaggcctgagcccaggaattcgaggctgcagtgagctatgattgcgccattggactccagcctgggcaacagagcaagacaccgtctctaaaagaagcaaatcagaacccttgtgcgctgttcctggaaatgtaaaatggtatagccacaaagaatatggcagttcctcaaaaagttaaaaatgaaattatcacatgattccagcaattccacttcttgacatgtattcaaaagaatcaaagatcttagagtatttgcccacccatattcatcacggcattatttacaatagccaagaggtggaagcaacccaagtgtccatcagcagacgaatagatcaacaaaatgtgctctctacatacaacagaatatgagtcacccttacaaaggaaagaaattctgacacatgctgtaacatcgatgaaccttgaagccattgtgctaagtgaaataagccagtcacaaaaagacaaatactgtgtgattccgcttatatgaggtatctagagtagtcaaattcacagagatggaaagtagtgtagtggttgccagtggctgtggggattggggaatagacagtttaatgggtatggagtttcagttttgcaagatgaagagttctggagattggttgtacgacagtatgaatgtactaaagccactgaactgtatgctttaaaatggttaagatggccgggcagggtggctcatgcctgcaatcccagcactttgggaggccggggcaggtggatcacctgaggtcaggagttcaagaccagcctggtcaacatggcaaaacccggtatctactaaaaatacaaaaaaaatagctgggtgtggcagcacgcacctataatcccagctactcaggaggctgaggcaggagaatcacttgaacttgggaggcggaggttgcagtgagccgagactgtgctccagcctgggtgacagagaagaactctgtctcaaaataaataaaataaaataaaatggttaagatggtaaattttctgttatgtgtcttttaccgtaattaatataaatgagattgagctatatcacttaaatggaaataactatgacctattattaagagaaactaaattatagaacaggtacagtgtgatattggttttaagttttaatatcacaaatatttaattgtttatttagaaatatacagtatatatataaatggatagaaaaagttctgaagataaagctttctcttccgtctcttcactggtacagaattccttaaataaattaatgtcaggctggacgcagtggctcatgcctgtaatcccagcactttgggaggccgaggcaggtgaatcgcctcagctcaagagttcgagaccaccctgggcaacatggtgaaaccccatctctactaaaatacaataaagtagccaggtgtggtagcactcacctgtagtcccagctactcaggaggctgaggcatgagagtcgcttgagcccaggaggaagaggttgcaatgagctgagatcacgccactgcactccagcttgggctacagagtgagactctgtctcaaaagaaaaaaaaaagttataggactggattgtggctcactcctcttgctgccataatatgagtggaatcatcctggataggccaattataatatccttattccattgccattgtgattatttcaaacctggatatcaaagacaagccaattagttgtaaccagagctttcactggagagttacgctctttttctatgggagaactgttaaaagctttaaatacaagctttaaaattgagagaccatatttactaacacattggaagtgcctacctgggttttactttacatagccaaacccaatcataattaatatcgaatgtatgtctcctaaaccaagagagaaaacagaaagaaattcaattaattaaaaaaaaagcagaatttgtcaaaatgtatggaactgcaccattggtgaactgtatgtttcattatgtgtaaattttttaaaaaactaaaaggaaaaataaatgtagaagaggagagggaagaagcagcaacggtaaatacaaaacaaagtaagataagggccgggcatggtggctcatgcctgtaatcccagcactttgggaggccgaggcaggccgatcacaaggtcaggagatcgagaccatcctggctaacatcctggctaaaaccccatctctaccaaaaaaatacaaaaaagtgagctgggcgtggtggcgggtgcctgtagtcccagctactcagaaggctgaggcaggagaatggcgtgaacccgggacggggagcttgcagtgagccgagatcgcaccactgcactccagtctgggtgacagagcgaaactccatctcaaaaaaaaaaaaaagtaagatggtgggaataagactagacatgcagtagtcatgatgaatgtgactgggttaaatagcctcattaaaagacagatgctcagatttgatttttttttttttaatcttgtggctgtgtgttatttacagacatagctagaacagaatggcacaggacagctggaaataaagggaaaaataaatttaccatacaactcaacaattccactcctaggtatctacccaagagaaggaaaatacatgtccatacaaagacttggatacaaatgctcatattttttttaaatttcttttttttgagacagagtctcgctctgtcaccaggctggagtgcagtggtgcgttctcggctcactgcagcctctgcctcccaggctcaagtgattctcctgcttcagcctcctgagagctgggattacaggcacgtgccaccacacccggctaattttttgtatttttagtagagatggggtttcaccatgttagccaggatggtctcgatctccggacctcgtgatccacctgcctcggcctcccaaagtgctgggattataggcatgagccaccgcacccagctgctcatattatttttcttcataataaaaagtggaaacaaaccaagcaaccataaacacagtggtccccaacgtttttggcaccagggactgtggaagacagtttttccacagatggcagtggggcatgatttctggatgattcaagcacatcacatttattgtgcactttattattattacattgtaatatataatgaaataattatacaactcaccataatgtagaatcagtgggagccctgagtttgttttcctgtaactagacagtcccatctggggttgatgggagacagggacagatcatcaggcattagcttctcataaggagcacacaacctagatcccttacatgtgcagttcacattaaggttcatactcctatgagactctaacaccgctgctgatctgacaggagctcaggcggtaatgtgagtgatgggtagtggccgtaaatacagatgaagcttcacttacctgcccgccattcatctcctgctgtgtggtccagttcctaacaggccatgggccactagtgattcatggcccatgggttgggcacccctgcataaccagataaatggataaacaaaatgtggttcattcacacagtggaatactgttcagcaatgaaaggtataaaccactgatagaacaacatacatgaatcacaaaatcaagtgaagcaaaagaagccagatacaaaatatacagatggtgcctgacttaggatggtttgacttaggatttttgactttacaatgggtttactaggatattacatgcattttcagcttacaatatttcaatttacacaagatttattggggctgggcatggtgggttcatgcctgtaatctggcactttgggaggccaaggcaggaggatcacttatgcccaggagtttgagactagcctgggcaacatagggagaccccatctctataaaaaataaaataaaaagaaggtttattgggatgtagctccaacataagtcaagaagcatctacacactgtatgattccatttacatgaaactctagaaaagacaaatctaatctataatgataaaaagtaaatcgttatggtattaggggtgtccatgaaaaaaaagaaaaagaaaagaagaaagtaaacattgttcacctgaggttggaggtagggtattggctggatacaggcacaatggaattagtggggaggggaattcattgtttctaaaaattatctattttgattgttgtgatgattgcttgatgtattgattcgtcaaatcaaaatgcacacaaaatgatggcattttattgtgtgtaaattatgcttcattaattaaaagatggaaaaggacacgcaaaagaaaaaataggccaggtacagtggctcattactataatcccaacactttgggaggctgagtgggcggatcacttgagcctcggagtttcagaccagcctgggcaacatggtgaaactctgtctctacaaaaaatttaaaaatttgctgggtgtggtggtgcaattgtgtagtcccagctactagggaggctgaggcagaaagatcgcttgagccaaggaggtcgaggctacagtgagctgtgatcgcgccactaaactccaacctgaacaacagagtgagaccctgtctcaaaaaaagaagaaaaaaaagaaaaaagaaaaaatggaaaaagaatatgctgtttgaatatgcaagatggaaaatattgaggttttctttgtgggctaacacatggaaaatgtcatgaaagtacaatgtacacttgaaaaggaggtgcactctctgttatgtaggtttaatatttatccataagatctacccaattatttcggtcttctgtatgcttatactttttttttttgagacggagtttcactttttttttttttttttttttttgagacggagtctcgctctgtggcccaggcgggagtgcagtggcgctatctcggctcgctgcaagctccgcctcctgggttcacgccattctcctgcctcagcctcccgagtagctgggactacaggcgcccgtcatcacgcccggctaatttttttgtgtttttagtagagacggggtttcaccgtgttagccaggatggtctcgatctcctgacctcgtgatctgcccgcctcagcctcccaaagtgctgggattacaggcgtgagccaccgcgcccggccttgagacggagtttcgctcttattgcccaggctgcagtgcaatcgcgtgattttggctcactgcaacctgcgccacccaggttcaagtgattcttctgcttcagcctcccaagtagctgggattacaggcatgcaccaccatgcccggctaattttgtgtttttagtagagatggtgttttgccatgttggcgaagctggttttgaacccctgacctcaggtgatccacccacctcagcctcccaaagtgctgggattacaggtgtgagccacccatgcccagcctatgcttatactttttatttttgactctttcagaagtcaaaagcagaaaaatacattagagtgtcctaaaactcgtgcttttttttttttttttttttttgaggcaaagtcttgccctgtcacccaggctggaatgcaatggcacaatctcagctcactgcaacctccgcctcctggattcaagcgattctcctgccttagcctctcaagtagctaggattacaggcgtgcgccaccatgcctggctaattttttgtatctttagtggagacggggtttcaccatgttgaccaggctggtctcgaactcctgatctcgtgatctgcccacagcctcccaaagtgctgggattacaggtgtgagccaccacacccagcttttttttttttttttaactacttagtgtttccacttcatgaaagtcgctactgtattgttttgtgcatggatactcataactgatatagttcttcctaattgtagcctttggcattgtgttagtccgttttcatgctggtgataaagacgtatcagagagtgggtaatttataaacaaaaggaggtttaatggactcactgttccatatggctggggaggcctcacaatcatatgatgcaaagtgaaaggcatgtcttacatggtggcagaggagagaataagagcgaagtgaaaaggaaaactccttataaaaccatcagatctaatcccagcactttgggaggctgaggcgggcagatcacaaggtcaggagatcaagaccatcctggctaacacagtgaaaccccgtctctactaaaaatacaaaaaattagctggacgtggtggcaggcgcctgtagtcccagcttcttgggaggctgaggcagaagaatggcatgaacctgggaggtggagcttgcagtgagcctagatcgtgccaccgcactccagcctgggtgacagagcgagactccatctcaaaaaaaaaaaaaaccaaaaaccaaaaaaccatcagatctcgtgagacttattcactaccatgagaacagtatgggggaaattgccctcatgatttaatgaactctcaccgggtctctcccacaacacatgggaattatgggagctaaactcaggatgagatttgggtggggacacagtcaaaccatatcaggcattataatatatccttttgccttatttaatgatttttggcctaaattctactttttctgatgttaagaacaggacttaaatgctttctttttctacttctttttgtattgcatttaccttatatattttgtccatcttttgatttttaccttttctaaattcattatccccaaagtagggtgctccagactagtcactgctgtgtgtcctttgttttctttttctattcttttttttttttttttttttgagacagagtctcgctttgtcaccaggctaaataaagtgcagtggcgcgatctcagctcactgcatcctttgcctcccaggttcaagggattctcctgcctcagcctcctgagtagctgggattacaggcacgcgtcaacacacccagctaatttttatatttttagtagagatgaggtttcaccatgttggccaggatggtcttgatatcctgacctcgtaatccacctgccttggcttcccaaagtattgggattacaggcgtgagccactgcccctgactgctttttttttttttttttttttaagagaaatctccctctgtcacccaggctggagtgcagtggggtgatcttggctcactgcagcctctgcctcttgggttcaagcgattctcctgcctcagcctctggagtagctgggactataggcatgcaccaccacacctggctaatttttgtatttttttagtagagtcagggttttgccatgctgcccaggctggtttcgaactcctgacctcaagtgatcctcccgcctcagccccccaaagtgctgggattacaggcatgagccaccagacccagctttttttcttttttaaaacgggagtgttcactgtggatgttctgttcctattccgccattgtatatgtggtgtttaaaggcagattatttgtccttttgtcgcataggtctctagatcaagtgaagccacacctcctgagatagaaactactacatataccccttgcttgcatcacctacatatacctctactctgcatcacctagatgtggtggtccttgagcatgatgacattactggacaggactttaagattgtctctgtgggtgagggaattgtgtatactttgcctgtgattgggaaagtgagttcaacatttggtaaacagaagggtagagtgtagcaacggcttgtgctggtcaccaagtattctggctctctgttttacggaccaaggtagcattgctcttccccaccacctttaaagtcagatgtggcaaagcgacttgctttggccaatgcaatgtgagtgaagatgacatgtatcatttcttgacagaagctttaagtcattgtgtgattagctgtgccccctttgccctgtgttggtaatcatgaaagcctggaaatggaaactgacttggcctgggtcccacagaacatctcagccagttcatggtggtgacattagggtgaacaataagtaagcatttcttgttttaagccattgatatttgggttgttgtttgtttgtttgcttttattactgcagcatgaccttggcctataccaactgataaagtatatgttaaaaagttggagttgaagcaattagaaaagaaaaagaaataaaagatatccaaattggaaaggaagtaaaatgatctctattcacagatgatatgatcttacatatcaaaatccctaaagaattcacaaaacactgttacaatgaataaatgatttcagcaaagtttcaggatacaaaatcaacacacaaaaatcagtagcattttatatagtaataatcacatgactgatctgaaaaagaaattaaggaaccaatcccatttgctatgcatcaaaaaggataaaatacttagcagtaaaactaaccaaagaggtgacagacttgtacactgaaaattatagaacattgctaaaagaaatttttttaaaaagatacaaaaatatagaaagacatcccacactcatggattagaagaccccatatcattaaaatgtctatactacccaaagcgatctacagattcaatgtaatccttatgaaaatcccaatggcaggtggggcgtggtggctcacgcctgtaatcccagcactttgggaggccaaggcgggcagatcactaggtcaggagttcaagaccagcctgaccaacatggtgacaccccatctctactaaaaaatacaaaaattacccaggcatggtggtgcactcctgtagtcccagctacttgggaggctgaggcaggagaattgcttgaacctgggagatggaggttgcagtgagccaagatcatgccactgcatcccagcctgggcaacagggcaagactccatctcagaaaaagaaaggaaaaagaaaaaaacaaaagaaaatcccaatggcactttttgcggaaatagaaaaagccatcctaaaattcatacaaaatctcaagggaccccatatagccaaaaaaaaaaaaatcttgaaaaagaagactgaagttggaggtctcacaatttctgattgcgtactacaaagcagcagtaatcaagaaagcatggaactggcataaagacagatatgtagaccaatagaatagaatagagagcccagaagtaaacccttggatatttggccaaatgatttttaacaagggtaatgctggagaaaggtcactctctttgacaaattctgttgagaaagttggatgtccacatgcaaaataatgaagttggaccttacaccatatacaaaaattaactcaaaatggattaaaaacctaaatataaggactaaaactataaaactcctagattaagctgggcatggtggctcacgcctgtaatcacagcacttttggaggccaaggcaagcagatcacctgaggtcgggagttcgagaccagcctgaccaacatgttgaaaccccatctctactaaaagtacaaaattagctgggtgtggtggctcgtgcctgtaatcccagctactcgggaggctgaggcaggagaattgcttgaacctgggaggtggaggttgcagtgagccgagattgcaccattgcactccagcctgggcaacaagagcaaaactgtgtctcaaaaaaaacccagaaatttattttttcacagttctggagtgtaaggaaagtccaagatgaaggcactggcatctggtgagggccttcttgctgtgtcctcacatggcaaacaaatgacaagctagtcaaaggctgcataaagcttcttttgtaagggccttaatcctgttaatgagggaggagccctactggcctaatcacctcttaaagatctcacctcttggccaggtgctgtggctcattcctgtaatcccagtattttgggaggccaaagcggatggatcatctgaggtcaggagttcaagaccagcctggccaacatgttgaaaccccatttctactaaaaatacaaaaaaattagctgggcatggtagcgcatgcctgtaatcccagctactcacgaggttaaggctggaggattgcttaaatccgggaggcagaggttgcagtgagccgagatgatgccactacactcaagcctgagcaacaacagtgaaactccctctcaaaaaaaaaaaaaaacaaatgccacctcttaatactattatagtgacatcatgtagattttggaggagacacattcaaatcatagcagatggtaaatttaatattatcttttttaaaaaaaacacaaagtaaatatggatatgtagatcaaagcaatgcacagtgggaaatgaaagtttaattatcaaaggaactgttgatcagaacatcatatccatttaaggttgttttattggtttttgttttgttttgttttgttttgtttttgttttttttaggcagggtctggctctgtcacccagactggagtgcagtggcatgatctcagctcactgcaacttctgcctccttggctcaagccatccttccatctcagcctcccaggtatctgggacaccacatccagctaatttttgtatttactgtagagatggggtttcgccatgttgcgtaggttggtctcaaacttctgagctcaagcgatcacccacctcagcccccgaaagtactgggattacaggcgtgagccaccgtggcttgcctaagctttattttaaaggctgttttcaatattatttgaagattgggcagtacatgatgcaatcaaacaaaacacaggtttcaggtatgtataaatacttatgctttatttcatatataatgctgtgtgttccttgacacacacagttctatgtattccaagtggtcactgtagtttatcacaggaaaatgttaatgccctagaaattttcatctgaggtatctaagcccataataggtcatcattaaatagtctctgaattattgttgtgtattatatattgtgtgtattttgtgtattatatattgtgtattataagttacaccacaaatactacaatatgttcgctcactctggaaattaaaaagtgggagatacactttaataagtataatggattgacccatagatgactttatattacataaactacttaagacatattctttgtgctgctttttctaaaatagaatatgttaatataaacatatttgaaattcaaaaagcttggcctgtgtctgttttgtttctcagtgcaatttctgttatcaatgtgcttataagtaataatttattaatactactaataaaaaattaacatgattgagaggaaaaaaatctggattaattagctaaagaaataaagcaacccaggagagggaaaaataagttataaaaaagaaagtgggccaggtgcggtggctcacactgtaatcccagcaatttgggaggctgaggcaggtggatcaactgaggtcaggagttcgagaccagcctggccaacatggtgaaaccccatctctactaaaaatacaaaaattagccggacatggtggtgtgcacctgtaatcctagctattcgggaggctgaggcaggagaatcatttgaacccagtaggtggaggttgcagtgggccaagatcgcactactgcactccagcctgggtgacagagcaagactccatctcagaaaaaaaaaaaagaaagaaagaaactggctgagacaggaggatcatttgagccccaggagtttgagatcagcctgggtaacaaaacgagaccctgtctctacaaaaaatacaaaaattagttgggagcagtagcatgcacctgtagtctcagctacttgggagactgaggcaggaggattccaattccttgatcccctgagttgaggatgcaatgagctataatcctgccactgcactcctgcctgggtgacagagtaagatcctgtctcaaataaatgagtaaataaataaatggccaggcatggtggctcatgcctgtaatcccagcactttgcgaggcctaggcggatcacccgaggtcaggagtttgagaccagcctggccaacatggtgaaaccccgtctctactaaaaatacaaaaaaattagccaggcgtggtggcaggcgcctgtaatcctagctactcaggaggctgaggcaggagaattgcttgaacccaggaggcggaggttgcagtgagccgagattgtgccactgcactccagcctgggcgactgagtgaaactccatctcagaaaaaaaataaaaaataaaaataaataaatgtatctgtctgttctcacactgctataaaaatctataatacctaagattgggtaatttatgaaggaaagaggtttaattgactcacagttctgcaggctgtacaggaagcatggtgaggggaggcctcaggaaacttacaatcatggcagaaggtgaaggggaggcaagcacgtcttaccatggcagagcaggagagagacagtgagctaataggggagtgccacccacttttaaaccagcagatctcatgagaactcactcactatcatgagaacatgggagaagtccgcctccatgatctaatcacctcccaccaggtccctcccccaatattgggaattacaattcaacatgagatttgggtggggacacagagccaaattacatcaatcaatcaataaataagaaactagcaatctaaaagagaggaagagaagagaaaaagaaggccaggcactgtggctcacgcctgtaatcccagcactttgggaggccgagatgggtggatcacgaggtcaggagatcgacaccatcctggctaacatggtgaaacccgtctctactaaaaaatacaaaaaaattagccaggcgtggtggcgggcgcctgtagtcccagctacttgggaggctgaggcaggagaatggcatgaacccaggaggcggagcttgcagtgagccaagatagcgccactgcactccagcctgggagacagagcaagactctgtctcaaaaaaaaaaaaaaaaaaaaagacaggtgcaacaactgaaaaagcacaaaataaaattgttagatcttctcacttaatctttatatatataaatatatatgtaatatatattttatttttgagttggagtcttgctctgtcacccaggctagagtgcagtggcgtgatcttggctcactgaaacctccacctcccaagttcaagcaattcttgtgcctccacctcctgagtaactgggattacaggtacataccaccatgcctagctaaatgtgtattttcagtagagacagggtttcaccatgttggccaggctggtctcaaactcctggcctcaagtgatctgcccacctcagcctctcaagtgctgagattacaggcatgagctaccacacctggcctcaatcttctaaatattttgacctcttttacatatttgccattttcttctcttgtgtgcattctggatctttcctgaattctatctttcagttttctgattctctcttcagccttgtctaatatgctgctaaattgttaaattcactcatttggttttttctttcagttagattttttactactagaagttctgttttgttctttttcggatctgtgttttcttagctcatcttttcaagccttttttttttttttttttttttttgagatggagtctcgctctattgcccagactggactgcagtggtgcgatctcagctcactgcaaccttcgcctcccgggttcaagtgattctcctgcctcaggctcccgagtagctgtgactacaggcatgcaccaccatgcccagctaatttttgtatttttaatagaggtggggtttcaccatgttggccaggctggtttccaactcctgaccttaggtgatgtgcctgtctcagccttccaaagtgctgggattacaggcatgagccactgcacccagttcaaattactctaagtatatatttatactcccatcaacagtacatgtgaatttcaatttttccacaacctcattagaacttggtattgtcagtgtggtagatactgccagttgtcccaggatctactttccccttcttcctttaataacagatttaatgagtttcacctggattgcagctgggcatgcccaaccaaatcatagacaagatgatgtggctgaaagtaatatgcatcacttctgggtcatgaccttaggaagcatgctccttagaaggtatgcttcccaaactcgagatctttttgatgatgttctttttgcatttggtctatacttccaaattcctttttatgtccctgtatttgaacacatttgcctgacaatgaaggccccttccccagggtagtgaatatttattgtttttgcttgcccacatccactccttcttcctaatagtacctaaattatttttcttgaaatgttacattttcctcaatatagtagtagaatttagatcagagtgcccagccctttccctatagaagctgaaggggagcactgaaggctccttctttcagaacccttctctcactatcatcccatatatctaagaaggcattcagtggcttagggagaaaaaaaaaagagttgaaccttgtttcttccagcatccagagccttgacggtggaagggaagaagcacagcatgaatattgccaaggttatatatgaccaggttactctgagtctggacacaacccatcgagaatcctggtgaaatgcctgcctaagggtagaccccatagcagttaatctgcatctagatcctgttgtttccaattgcataagctacaagagctagcagaggttttattccagagaatggtatgtaaaccaccagccagtcagaatatgtcctcaaaccactagctaataaaatgtcacgtcctcttagaggcctcattcaaatcactctagtaaccctaagaatgaaatgtaacaagtaagaaatgcagctaggttataaacctagtctgaaggagactaatggtagttgactttgacagaactgacaattggcagctgacttctctggggtctcccacacaaaaccttctgtgtatttgtgcttcaactcatcttttagaccattctgaatcagagcactttatatttttattgttctttacttttcatgttctggattggtgaaattaatctctgaaaaatgggctgggttggtctttataatgtgaagtcaatgttactaagctgtcatgaggagagcattataccaacaatgaggcttcctttaaagaattttttggactggatgtggtcattcacacctgtaatcccagcaatttgggaggccaaggcaggaggattccttggagccaagagtttgagaccagcctgcgcaaatagtgagaccctatgtccaccaaaaagtaaaaagttaaaaaattagccaagaatagtggcgcatgcctgtagttccagctactctggaggctaaggctgtgggatcacttgagcccaggaggtcaaggctgcagtggctgtcatggcgccactgtactccagcctgggcaacagagtgagctcctgtctctaaaaaaaatttaaaaaggaggttgggtgcagtgactcatgcttataatctcagcactttgggagactgatcacctgacctcaggagttcgtgaccagcctgggtaacatggtgaaaccccgtctctactataaatgcaaaaattggccggatgcagtggctcaagcctgtaatcccagcactttgggaggccgaggtgggtggatcacctgaggtcaggagttcgagaccagcccagccaacactgtgaaaccctgtctgtactaaaactacaaaaattagccaggcgtgatggtgcatgcctgtaatcccagctactcgggaggctgaggcaggagaatcgcttgaacccgcgaggtggaggttgcagtgagctgagattgtgccactgcactccaacttgggcaacagagtgggactcttaaaacaaaacaaaaagcaaaaattagccacgcaaggtggctcatgcttgtaatcccagctactcgggaggctgaggcaagagaattgcttgaacccgggaggcggaggttgcagtgagctgagattgtgccactggactccaccctgggcgacagagcaagacatctcaaaaaaaaataataataattaattaattttttaaaaattgcctggcacagtggctcacacctgtaatcccagcaccttgggaggccaaggccggtggatcacttgaggtcaggagtttgagaccagccttgccaacatggtgaaaccccatctctactaaaaatacaaaaattagctgggcctggtggtgcacacctgtaatcctagctactcaggaggctgaggcaggagaatcgcttgaacccaggaggcagaggctgcagtgagccgagattgcgccactgcactccagcctgggcaacagaacgagactccgtctcaaacaaaaaaaaaacttaaaaaaagaacaaattttttggagacggggattctgcataacaaaaatgactgctgggcgcggtggctcacgcctgtaatcccagcactttgggaggccgaggcgggtggatcacctgaggtagggagttcaagaccagcctgaccaacatggagaaaccccgtctctactaaaaatacaaaattagccggggtggtggcgcatgcctgtaatcctagcaactcgggaggctgaggcaggagaatcgcttgaactcgggaggtggaggttgcggtgagccgagatcgcgccattgcactccagcctgggcaaaaagggcaaaactccatctccaaaaaaaaaacaaaaaacaaaaatgactatgatctttgaaaaataattgtgcaggctagaaactttgagtggctgaagtatatgttagttccccgagagtaagattctaggggataggatccccatggcatctagaacaatgcctaactttatcttgaaacaatgaggggaatgtgaaagggcctgtttaaacagtggtgctgtctcccaactaggtgctgaaagaccctttgtgttgagggcagggatctggttagaggacctgagagccttaagctatcaggccaagtgggaaaggaaaaggccaagagaagagtttccacccacctccacctaatcttacctttctctgtcttccactaccatcacttttttttctttttcccaccttttttttttcaaaacttttttctttttttcttgatacagggtctcactctgttgcccaggttggagtgcagtggtgtaatctcagctcactgcaacctctgcctcctgggctcaagccatcctcccacctcagcctctggaatagctggaactataggcatgcaccactatgcctggctaatttttgtattttttgtagagatggggttttgccatgttgcccaggctggtcttgaacttgtgagctcaagcaattggcccatctcggccttccaaagtgctgggataacaggtgtgagccactgcacccagcttaaaatgttttttaaaattgtgacatacagcacacagacaggaaagcacaagggataaatgtacagctccatacgttttaacaaagaaaatatttgtgaaattaccacttagttcaagaaattggctgggcgcagtggctcatgcctgtaattccaacactttgggaggccaaggtgggtggatcatctgaggtcaggagttcaagaccagcctggccaacatggtgaaaccccatgtctgctaaaaataaaaaaattagctggacatggtagtgggcacctgtaatcccagctactcaggaggttgaggcaggagaatcacttgaacctgggaggtggaggttgcagtgagccgagaatgtgccactgtactccagcctgggtgacagtgctagactgcatctcaaaaaaaaaaaaaaaaaaagaaagaaatagaacattgtcagcaccctagaaacccactcatgtctctcgccaccaggcctactctttcccttcttcccaaaggcaactactaccctcacttctaacattttaatttgtttgcttatttttgaaatatatgtaaagttaattgtacaataaatattcttctgaactactattgttcaacattttcatgaaggtacatttattaaattatagcatatgggaaaatgcacaaatcataagtggtacagcttgatgaatttttcacaaactgaatgtatctatgtaactagcatgcagatcaagaaatggagcattatcagaagtcccctttgtgcctccttctagtcactatccctctctcccaagagtagctactatcctgagttctaacagtataaatcagttttattattttaccttatatacatgaaaatatacagtatatactcttttcttcgtagcttttcttgctcaatattgtttgtgaggttcatctgcattgttgcacatagttgtagatcactcattctcattgctgttttgtattccattgtataaatgtaccacaatttgacgattcattctagtgtaggtggatatttgggttgttttttccattttcagctattacaaatactgccagtatgggcagacatggtgccttacacctgtaacccagcacattgggaggcctaggcaggcagatcgtctgagctcagaagtttgagaccagcccgagcaacatgctgaaactctgcctccacaaaaaatacaaaaattagctgtgcatggtgccgtgcacagtaagtagtagtcccggctacttgggaggatgaggcgagagggtcacttgtgccagggaggttgaggccacagtgagctgtgatggtgctactatttgtttgtatataaatagtatatttgtggccggatgcagtggctcacgcctgtaatcccagcactgaggaaggctgaggtaggcagatcacgaggtcaagagatggagaccatcctgaccaacatggtgaaaccctgtctctgctaaaaatacaaaaattagccagccgtggtggcgtgttcccgtaatcccagctactcgggaggctgaggcagaattgcttgaactcaggaggtggaggttgtagtgagccgagatcatgccactgctctccagcctggtgacagagggagactctgtctcaaataaataaataaataaataaataaataaataaataaataaaaataaataaataaatagtatatttgtacactgttagaactcaggatagtagtgggagaagatagtgactagaaggggcacaaaggggacttctggcaatgcttcctttcttgatctgggtgctagttaaatagatgcattcagtttgtgaaaaattcatcaagctgtaccacttatgatttgtgcactttttttttcttgagacggagtttcactcacactatcgcccaggctggagagcagtggcacgatctcagcttacagctcactgcaacctctgccacttgggttcaagtgattcttttgcgtcagcctccccagtagctgggattacaagtgtgtgccaccacgcctggctaatttttctatttttagtagagacagggtttcaccattttgaccaggctggtttcaaactgctgacctcaagtgatccacccaccttggcttcccaaagtgctgggattacaggcataagccaccgtgcccagcctgtgcacttttttatatgctatgatttaataaatgtttcttcatgaaaatgttgaacaatgtgatcactccagcctgggtgacacggcgagattctgcctcaaaaacaaaaacaaacaaatactgccagtataaacattcttagttatgtctcccggtgaacatatctatgcatttcttttttttttttttttttgagacggagtcttgctctgtcgccaggctggagtgcagtggtgcggtcttggctcactgcaacctccacctcctgggttcaagcgattctcctgcctcagcctcccaagcagctgagattacaggcatgcaccaccatgctcggctaatttttgtatttttagtagagatggggtttcaccatgttggccaggctggtcttgaactcctgacctggtgatctgcccgcctcggcctcccaaagtgctgggattacaggcgtgagccactgcacccggaccacacctatgcatttctgttggttatatgccttagagtaagattcctgggtcatggtctgttcagatttggtagatactaccagacagtatttcagagtagtcatcccaatttacattcccaccagcagtgtatgagaatttcatttgtttcacagccttgccaaccttcaatattacatctcttattttagccatgttgatgagttgtacatatactggtatctcattttggctttagttcacataaccctggtttctattgaggttgaattcctttcacatgtattgataatttaacttttattttatgtgaaataccttcacatctcatttttctcctgtaagttgtcattttcaaattgatttgtgggatttctctacattgtctaaatgaatcctttgcaggttaaatgcgtcacaaatatttccttgtactctgtagtttctcagtttctttatgaaaggtatctatgtatagattatatatgtacatgtttatttgtatattggctttatgcccagcaatcttttgattcccataatttacctgtagattattttggattttgaatgtacacaatataagtaaacaatgacaattttgtttcttcctctccaatacttatttccttccttccttcctttcttccctccctccttcctctctcccttcctccctccctccttcccttttcctttctttttatacccattgcattagtagggcctgcattacaatgctgataagatattgtattagtttcctaaggctgctgtaacaaagcaccacaaactgggtgccttaaaacaacagaaatgtattcttcacagttctagggactagaagtctgaaatcatggtattggcagggtcatgctccctttgaaacctgtaggggaattctttccagcttcttcttagcttctggcggtttgcggccaatcttgggttttccttgtcttgtagcagcataatcccagaatcccagtctctgccttcatcatcacatagtgttctccctctgcctctgtgtcttcacatgaccatcttattttaaggacaccagatacattggatttggggcccactctaacatgacctgatcttaactaattacatctataactacctgatttccaaatgaggtcacattctgtagtactgggtgttagaacttcaacatattcaactcataacagatgtgatgatagtggacgtctgtacttgatcttagtggcaaaactttcaacttttcaccattatgtgtgatgtcagccgggtatggtggctcacacctgtaatcctagcactttgggaggccgaagcgggtggataacttgagcccaggagttcaagacaagcctggccaacatggtgaaaccccatgtgtatatatatatatatatttttttttctttgtttttgagacagagtcttgctctgttgaccaggctgcagtgcagtggcatgatctcagctcactgcaacctccgccccccgggttcaagcaattctcctgcctcagcctcctgagtagctgggattacaggcatgtgccaccacacccagctaatttttgtatttttagtggagatggggtttcatcatgtcggtcaggctgctcttgaactcctgacctcaagtgatccgcctgccttggcctcccaaggctggggttacaggtgtgagccaccatgcccggcctaaatttatacatttttcaaaagaaaatgtcagcccaaaatattaaaaacacaactaactagggtttctgggttgggttcctgatctgggtgccgatttcacaagtgtgattggcttgtgaaaatttactatgctgtctacttaagacatgtgttaaataaaatttatagcaagttgggcattaggcccaacagaacaaaccaaaatggagtttattgatgttgccatgccaaaattaaaatctttatctgaccattcaataaaccaggagagagagaaataatagccaagtctgcaaacagtccatttttagccagcatgataaagaagtcctctctgctttaaccttataagaaaagaaactttgaaacaaacaatccacttttagttttctgtttctctcttttttttcttttttgagatggagtctcgctctgtcacccaggctggagtgcagtggcacgatctcagctcactccaacctctgcctcctgggttcaagtgattctcctgcctcagcctcctgagtagctgagattacaggtgagcaccaccacgcctggatactttttgtatttttagtaggcatggggtttcaccatgttgaccaggctggtcttgatctcctgacctggtgatctgcctgcctcagcctcccaaaagtgttgggattacaggagtgagcccccgcgccctgcctctgcgtttcttttctgtctatgaaattatcccgattgttctgctcattggaacactgtttctgctttatagaatgagacgttgcccaattctagaatagcaggtaaaagttaattaagatctttaaactaaatttgttgtaattttgtcttttgacatgtaattttctgtatattcgttatacttcaataaaaagttaaaagaaacataactaaatttctatttgaaaacagaagctcttccttttgaaggatgccttgctgctccactttccattcacattcacctcctgagagaggtgaagatctgggttgctaagatggaagaaaggtcaattatttgcatgttactcaagtgatgcactgacacaatattctcacagttctccctccccccgcccccccccacacacccaaaagaattcagtgtattagctttgctttttagtgattcactcaagctaaagtaagagtttatgtctggtattacgttgagagcttttggaagattatcttccaggttgtctttagaccatctttgtatctggtttttgctctctttgcttttgctctgagattctgcaacaccgatttatatgtgttgagacagtctaaaaaattccatttctccccttctacaattcctgcagatgttactcactatatgtctgcaggaattggtgtaatcttacactctgccttgaaaacacctttccattcttcacagctttgttcccagttgaatttctggggagaattgagttaggtctattcatttaatttgggagaaactgacatctttacaatttttcctcttttcacccaggatcatggtaagcctctccattatttgaagtctaatttcatcctacttggatatgcttctttatgactctgtagctttctacatataagtcctacatctttcttgttagagtttttcctagttgctttatgtttttttgttgttgttgcgattgttgctattgtgaatggaaccttttttttttttcattcaaaaatgaacccgtggagcgataggatctctaccacctctttcggctgtgagactctatggtttttcagttctatgagaacattctactggagcctacattatctgaacccaaaggaagatggcaaccacgagtcgccaagtaaaggaccgctctatctcgcctttgttctcctctcggtggttactgcgcagacgtagtcgcccaagtcgcgtccccgccttcccggtcgcgggcccagctcgggagcgccggcgcactggcgcgctccgtttacacgctccggggcctgtaggcgccgcgagttccggctgtcgccgtcgccgccgcggctcctggaggtcggttgcgacgagtaacggcgccaggacgagccctgcgccttctttttcgatatgtacccgaattggggccggtatggcgggagcagccactatccgccgccaccggtcccaccgccgccgccagtggcgcttcctgaggcctcgccggggcccgggtactcgagctcgacgactcccgcggccccctcctcctcgggcttcatgagcttccgcgaacagcacttggcgcagctccagcagctgcagcagatgcaccagaagcaaatgcagtgcgtgcttcagccccaccaccttcctccgccccctctgccgcccccgccagtgatgccggggggcggctacggagactggcagccgccaccgccaccgatgcccccgccacccgggccggccctcagctatcagaagcagcagcagtacaaacaccagatgctccaccaccaacgagacgggcctcctggtttggttccaatggagctggaatccccccctgaatctccccctgtgccgcctgggtcctatatgcccccatctcagtcttacatgcccccacctcagccgccaccctcttactaccccccgacctcatctcagccctacctgcctcctgctcagccgtccccttcgcagtccccaccttcccaatcctacctggcgcccaccccttcttactcatcctcctcctcttcctcgcaatcctatttgagccattcccagtcctacttgccctcttctcaggcatctccttcccgcccctcccagggccattctaaatcccaactactagctccaccaccaccgtccgccccccctggaaataagacaactgtccagcaagagcctttggagagtggggccaaaaacaagagtactgaacagcagcaagccgcccctgagccagatccctctacgatgactccacaggtaagaaagcatctgcctgaacctcatctttcacctagagggccctgaatgagcaggcctcagggctttaaccagtggttagtctaattccaacacacaatgactagctaacactccaaaggattccgtaagagtcagagggctgacagctcagctttttaattagctagatgtgaattaccaaaaaaacagcgtttgtagatgtgtatggattacatacagtggtggggtggctcaaaagttacctctcagatacattccttggtttctttgaccatcctcttagattttgttgctgttgcaaatagattttgttgcagagggtcttgttttaaaattgtattttaaacgaaagtttccatttgagagaaagcatgaaaaagaggcctcgccaagggctgacacttgaatgtttgtaaactttatgattagttagcttcttttaaaaatattacttaggggccagggatagttgtcagcttcctgaattaagaggtttcagaaaaaggatggaaatcttgtcttaccaggagcatcctaattatgcttataggtacatatacaatacatagatgagtcccgagacccttttggggatcgattggtccattttaggaattgacccagacatccttttctcatattatttaaagattgttttaagataatgagcaattttctgcgtttcattgtcattaccattcactccaaagaaacagccttgcaatttggccaacgtaaaaaaagtttggtgatatcttttcatgagagagtcagccattcttatcccgcagaacagacaaattgacagggtaacagtaataaacgagttcccccttgagagagggaaggtcaaactaaagcagaataaatcaattgttatgatttcctaaagtagacactttttcagcgattactaatttaccttagattcactaaggaaaaaagagaatcttgtaatataaacgctcagatttacctataaaagatttccaaaagatagggatgcagtattataattttacggtggtttggcattagaaattaagaacagaagcaagttgttttaagaaatgatgcttggcacatcttctggagaaaacacttgggatgctgaaataaagtagtagaataatgattctgttggcttacatcaaatttgtaccatctcaccagtttattttccccagattgctctattatagagacagactttctgtcctctttcccaccccactctgaagtctttagtgcttttgttgtcaaacattctcagttagtctgagccaaaataggacatttatattctcactctactagactgtttttctgaccttacagagagacaaaataattgtatttttggctttttttgggaggagtgtgtgtgtcagatcaggccttaatatgtatagttaccatgaacagtgcttttacttttctgcctttgtacccttttctgtaatgaactcagtgtcttgaatattcagtgcctgcaattctttggtgagaggcagagtggtggaaaatgagacttgtggtgcacatagaccagatcaagaagagccttgaagcctgtggctttctttcttctttttagaattcatcctaacctcctcaaccctctgtttccccttagagttgtattgctttcaaggcatatctcaaatatcaaggtttccatgaagccctgcttgtgctcacccatctggtttggttctgttcttcagattgtaagtcccttgcagacaggaattatcttacttatcttcttattaccgtagcacctaggacagtgccttgcaaattgtaggctctccacagatttgttgaataaaatacgagagttgtcatgttctagacttaggatatgttggtttattagatgataaatatttcttcatgccagtaccagtctctggcaatccttctacatatttattattctttgattcatattttgtttttggaatgtgtcattcaaaatttcttatcgtgaaatatttttaaaatacacaaaatagagaaaaaagtatgattccccatacatacccatcattgagattcaacagctatcaagattttgccatgtttacttcacctaggccttttttattattgttgcatatatatatattgagacagggtcttgctctgtcagtcacccagggtggagtgtagtggcatagtctcagttcactgcaacctctgcctcccaggctcaagccatcccaagtagctgggactacaggtgcatgccaccatgcctggctatttttttttttttttttttttggtagagacggggttttgctatgttgcccaggctggtcttgaactcctgagctcaaacagtacactgccttgacctctcaaagtgctgggattatgggcatgaaccaccacacctggcctctgctgaaatattttaaagcaaatcttagatcttatgtcatttcatccctacattcttagtcaagtacctctataaaacaaaacaaaacaaaaccaagaccttttcttttttttttttttttttgagatggagtctcacactgttgcccaggctggagtgcagtggcgcgatcttggctcattgcaacctctgcctcccgggttcaagcgattctcctgcctcagcctcctgagtagctgggattacaagtgcatgccaccacgcctggctaatttttgtatttttagtagagacggggtttcaccatgttggtcaggctggtcttgaactcctgacctcatgatccagctgccttggcctcccaaagtgctgggattacaggcgtgagccaccgtgcccggccaagaccctttcttagataaacacattgttaacacctaacaaagttaacagtttcttggtatcatctaatacctgatccgttcagatttcctttattgtttcatcatactaatgaactaaaaataattctttgataccatccatgttaaaataccccaaattgactcaacagtgttgttgttttctgtcctcacagtctgttcccaaacaatgtttttttggtgtgttcaagtcagagtccaaacagaatactgaaaagattcttagtatagatcagggtttctcagcttcggcactatggacattttgggcaggatgattctttgttgtggaggggcttgtcctatgcattgtaggatgtttaacagcgtccctgacctctacccattagatgccagtggcagcccccagtccgacaaccaaaaatgtttccacacattgccaagtatcccctggagacaaaattaccctctgttgagaacccttgacctaggtcagtccctcctattttctttttctacctcatgtctttgaacttgatgaaaaatctgttgtcagttttcctgtagaatgtctgacattctgcattgtctgctttttcatggtgtcacatttgacttgttcctatgtcttccacattttttttttttttgaattagaagttaactctggaaccttcatttaagttcagctttcttttggcaagtgttgcattcctcatgggacacccgatgcctggttgtcccactgttagtaatgccattggtccctctactgtaaagctttctatcaatcttgcatctaatgtttcagtctactggttcatcaattgaagaaagaccttgcctaagtaaattatttcattagacagaggttgcaacctggtgattttttttttctgccatttcttccacagttactatatggagttatgtaaagaaaaacttttgccacagatatttgattggaaatacagttggtataggaaggacaagataaatacttgatatttttccaggtgttttctagtttttcgggtaaagtgttgatgatttaatggaatgtgtttttttgtttgtttgtttctgagagagagtctcactctgtcgctcaggctggagtgcagtggtgaaatctcggctcactgcaacttccacttcctgggttcaaacaattctgccctagcctcccaagtatatgggattacaggtgcatgctaccatgcctggctagtttttgtatttttaatagagatggggtttcaccatgttggtcaggctggtctcgaactcctgacctcaagtgatccacctgcttcggcctcccaaagtgctgggattatagacgtgagccactgcgcccggtcggaatgtgtctttttgaataattaatttttctatgtgtttaaaggactgatttatttagttaaagctgttggctttgattagtttttagaggtatcatttatttaatgtttaaatacttacggactagcaactatgtgccaggtactatgagtactgtgcttaatactggagatgaaatggttaacaagatagacatgggacctgccctcattgacttcttgtttcagttgtgggggaagggagaagacatttagtaagtaattaagaggagacgtacagagtgctatgggattataaaatatcactagattattccccaaggaactggcaaaggcaagttttttgttttttgttttttttttaagttaccactgtattcacagtaccttgcataggatctagcgcataggaggtggagaacaaatatattttaaataattgaatatagctgggagcgctaacctaattaaagaggattccctttgtaaagtgatattttttattttttatttgtttttattttattttatttatttttatttttttgagatggagtctcgctctgttgcccaggctggagtgcagtggcgcgatctcggctcactgcaacctccgccttccgggtttaagcaattttctgcctcagcctccctagtaactgggattacaggtgcctgccaccacgcccggctaatttttttgtatttttatctttttttttttttttttttttttttttttggagacgaagtctcactcttgttgcccaggctggggtgcaatggcacgatctcggctcactgcaacctctgcctcccgggttcaaacaattctcctgcctcagcctgcctcagctactcccaggagtagctgggattacaggcgcctgccaccacgcttggctaatttttgtatttttagtagagacgaggtttcaccatgttggctaggctggtctcgaactcctgaccccaggtgatctgcctgtctcagcctcccaaagtgctggggttacaggtgtgagtcagagtgcccggccatttttttttgtatttttagtacagaagaggtttcaccatcttggccaggctggtcttgaactcctgacctcgtgatccacctgctacggcctcccaaagtgctgggattacaggcgtaagctgccacgccgggcctgtaaagtgatatttaaatgaactctaaagaataagtaggaggactgggtgctcacacctgtaatcccagttctttgggctcattagaggccgggagttcaaggccagcctgggcaacaaagtgagacacccccccccccgccccccgcccacaaaaagtttaaaaaactagccaggtggccgggcgcagtggctcacgcctgtaatcccagcactttgggaggcctaggcgggcagatcacgaggtcagaagatcaagaccatcctggctaacatggtgaaaccccatctctactaaaaatacaaaaaattagccgggcgtggtggtgggcgcctgtagtcccaacttctcaggaagctgaggcaggagaatggtgtgaacccgggaggcggagcttgcagtgagccgagatcgcgccactgcactccagcctgggcgacagagtgagactccgactcaaaaaaaaaaaaaacctagccaggcatggtgttgcatgcctgtagtgccggctacttgcgggtggctgaggtgggaggattgtttaagcccaggagttctcgtgccactgcactctagcctgggcaacagagtgagacctaaaaaaaaaaaaaatgagtaggccaggtgcagtggctgatgcctgtaatctcagcactttgggaggccaaggcaggcggatcacttgaagtcaggagttcaagaccagcctggccaacatggtgaaattctgtctctactacaaatacaaaaaattagctgggtgtggtggtgcacgcttttaatctcagctacttgggaggctgaggtgggaggatcacttgaacccaggaggcagaggttgcagtgagccaagattgccccactgctctctagcctgggcgacagagtgggactccatctcagttaaaaaaaaagaaaaagagtagaaattaaccagaagttagaattcaaagaattaagttcaataaggctcactgaaagctcagggtgaggatggtaggtatgaactagatcagggaaggcctgtaaggacttcattctaagggcagttggaagccattgaaggattttacataggtgaatgtgacagattggcatttttgaaagctcactctgcttgcagtgtggagagcagaattaaaaggagcaagagtgatttagagagaatagttattgaagtaatccaggcaagagataatagtggtttagactttgatggtattagttgagatggagagaagtgggaagagtggagaaatatttagctgctagaattcactttgaggttgagtagttatggagagggaggcatcaagaatgattcttaggtttctgggctgggccgtagggtggatggtggtcaaatttactaaaacagaaaaacctaaaggaggaggaggaagaacatttctgggggtgaggagaaaatcatgagttaggtttcagacatactgagtttggggttcttgagacatagattccaaatggagatgtccacttggaagttagatatagctctggagtctagatgtaagatctgggagacatagatttataagtcatcagcataaaaatggtatttgaagacacagaaatagatgaagcctctcaaggaatgtgtgtagagtaagaactgaggttaaaggacattaagcctagctccacaaatagcagtatctaagggaaccaatgaaagaatggccaaataggtattcatattaggttggtgcaaaagtaattgcagtttttgctattacttttaatggcaaaaccacagttactttggcaccagtgtgataggtggaaaatcaagatagtggatagtgcgttgccatgaacgtcaaggaacagactctaggaggagggagtcgtcagctgtgtgaagtactgctgagacgtcaagcaagataaagactgcgagttatcttttgcacctactgacatgtagattattgttgaccttggcaggagcagtttcatagtgactgaagccatattgcattgatttgaggagtgatggaaggtgaggaaatggggatggtgagtacagacaactctttcaagaagtttgactgaaggagagagagaatgagggaaggagctggaggaatagatgaagtaaatgagcatttaaaataaaaataggtggggactaagcttatctggtgaccctgattcttacagtagaatgtgaatctcaaaaatatttaagcctattttaaataaatttctaaaatggaaacccaattcattattttaccaggtgtcctccctgccccctgctttagaatataagacatagaacattgtcttataggcatttatgataacctggatagggaaggtaatcttctaaaattaatctttaaaacattacacacaaacactcacctcctttatagttctccacttggaaaatcatttagtatctagttcattactagcagcagtggtcagtaagtgcttcctgagtaaattaaaatcaacatctttcttttttttttttttttctcagagagatgggatcttgccatgttgcccaggctggtctgaattcctgggctcaagcgatattcgtgcctcggcagcatctttcttaataacagtatttgtgacaaatagttctatattcttaattttttttttttttttgagatggagtctcgctctcacccaggctgaagtgcagtggcgcgaggatctgggctcactgcaacctccgcctcccaggttcaagcgattctcctgcctcagcctcccgagtagctgggattacaggcatgtgccaccacacccagctaagttttgtatttttagtagagacagggtttcaccatgttggtcaggctggtctcgaactcctcaccttgtgatccgcccgccttggcctcccaaagtgctgggattacagatgtgagccaccgcacccagccaatagttctacattctttatgtttgaaatcccttcattcaatctcgttttaaatgtgacctatattatgatttccctctacctataaaacaacatcccatatgaaatggagttatctgatatgatgggacattcagaagagctggcatcattagcaagttcaggcattttttttctttctaaaatagggatgatcacacttctcttagggtcagtaaggacatttgtgagtgatatcattattatttatttgcagagcttcaaaaatgtgctgaagcctaccataggattgaattagatctggttactacttatagggttcatattaaatagaaattgacctacaaggcggccgggcacggtggctcacgcctgtaatcccagcactttgggaggctgaggtgggcggatcacaaggtcaggagatcgagaccatcctggctaacatggtgaaaccccgtctctactaaaaaatataaaaaattagccgggcgtggtggcgggcgcctgtagtcccaactactcaggaggctgaggcaggagaatggcgtgaactcgggaggcggagcttgcagtgagccgagatcgcgccactgcgctccagcctgggcgacagagcgagactccatctcaagaaaaaaaaaagagaaattgacctacaaggcatactgtcagtgaatcaacaagtacttcagcccttaacaagttcttaaccctggtctggatctaagacaaagcatgagaataggtgatgaagaagctgataaagaatctggacctgtacagttttcattctgtacagtcttcatatctgtagcattggcttagtttgtgaaagatagtttgcatctttgtatcttttaataatgctttcaaagcaactttaaaaaaggaaacttttaacttctacttgaaagagaatgtactaatttttttaaaactgaaggataagtctgttgatgttttcagtattaaaataatggaaggaagtgttttaatgctacattattattattattggctttggctttcatggtcagtgtgctgttttctttctttttttttttttttttttttttttttgagacagagtctttctctgttgcccaggctggagtgcaatggcacgatctcggctcactgcaacctccgcctcccaggttcaggggattctcctgcctcaccctccggagtagctgagattataggtgtgtgccaccacaccctactaatttttgtatttttagtagaggcgaggtttcaccgtgttggccaggctggtctcgaactcctgacctcaggtgacctgcccgcctagacctcccaaagtactgggattacaggcatgagccactgtgcctggccaagtgtgctgttttcttacgttgaatagtaaaagtacagatactctttgacttacagtggggttacatctcaataaacccattgtaagttgaggataatgtaagttgaacatttaatacacctagcctactgaataccatagtttagcctagctattaaatgtgctcagaaagtttacattaggcaaagtcatctggccacacagtacacagtagagtattggtttttttcttgttttgttttgttttctttgagatggagtcagtgagtggtgcgatcttggctcactgcaacctccacctcctgggttcaagcgagtctcccgtctcagcctcccaagtagctgggattacaggcacctgcgaccatggcccagctaatttttttgtattttttttgttttgagacggagtctcgctctgtcgcccaggctggagtgcagtggcgtgatctcggctcactgcaacctccgcctcctgggttcatgccattctcctgcctcagcctcccaagtagctgggactacaggtgcctgccaccatgccaggttaatttttttatatttttaggagagatggggtttcaccgtgttagccaggatggtcttgatctcctgacctcatgatctacctgcctcggcctcccagagtgctgggattacaggcgtgagccactgcgctccgcctttttttttttgtatttttgtagagacggggtttcaccatgttggccaggctggtcttgaactcctgaccttaggtgatcagcccaccttggcctcccaaagtgctgggattacaggtgtgagccactgcacctggccgaggattgattgtttgccctcatgatgtgtggctgactaggagcctagggctcgctgctgctgtccagcatcacaagagagtatcatactgaatattttgagcctgggaaaagatcaaaattcatggtatggtttccagtgaatacatatcactttcacaccaccataaagtcgaaaaatcataagttgaaccattgttaagtcagggaccatctgtaattatatcctgggagctgatgattatatgtataatagttaaaaacaaaaaatccagtcatgggttaaacgtcaagatggagtttatgagatggaatttattcttcccaatagattggaacaagtttcaggtaatagtaatgagtgaccgagagggaagggcttcagttgatcaataaccatttattgacatcctactgtgtgctctagcactatgcttgactaccagataggatataaaaagaggggaaggcagctgtcccctaagaaaaattacattctttgagtgaaaagtaggtaacaaatcagtatgtttggtgagaaaaaggtatgtattatgtatatttaatgcatctgtttgcatatggaaaattaggggaggttatactataaaatattaacagtgtaggaaatcctagttatccagagataattggattagaaaataggcaagtaaagtgaattcatttaacacaggaaccaaaagtttattgtaaaacataaaacatttgattgggacccagtctggaaaaacaaagctcaaagtgataaggataagcagattttatatttgatggaattgttataaatgaaatcatagccaagttttagaatgaacaaagaataaactatagattgggtttctttgctgtaatttttgtgggaaaattatataacaacattatagatcatcttttatttcattttttgacatgttgaaaaaatattttagggatttatcgatttttatacggactgtttttcaacctttggtattcaggccattctcttttatagtttttactgtaaagtactgttcggttgttaactggtaggacttctagcagatcctcagctgccagtaataagttccaatgttctccaacatcactttcttgaaatactacatccatacaattgtagtagaatcatatgcttttgttagtcatataagtatacagggcagttcatcagtgaatattttagtgttatgataacttttggttttctttatgcaaccttgtaaccatgggaaattatataatactaggataatgacactcctgtagtttttttctgagtggtgagatttcttttattgattttaattaattagttattacttacctgtgtagtcagttttctttatttgagatttttaaactcaccacagacactgaattagtgaatactgaaccagtgctcctcggggaaatacagggttaggttcctgtgagtctcttgtcacatttttatcaactgatgaacacatagccttgtttatgtgtgtttctgtttaaagaaccttatttagtacatattgttgatttattaacattgtactcatggccaacagcactgtagcacttgtccgaacaaagctgacctaacacagatattttctctgtgagacataagaccgctttcttgctcttgggacactaaacagcatctcagctctatgcctgggggccattttaaatagtgaaatcaacaaaaaagcacaaaagtttgacaaatgtgtctctaaatagactgaaaatgacacttatttatagtatagagctggaacaagaaggcagagcatcaccttgcacttcatctcggctgggaatgcacacatgagtcaggggactcatgtttttcactgctgtccacatgtttgtgaatgactgggaaagctcagtgagtatggattttgggtttagaaataaattttaggtcgggtgtggtggctcatgcctgtaatcccagcactttgggaggccaaggtggatcacttgagtccaggagtttgaaaccagcctgggcaacatggtgaaacttgtctctacaaaaaatacaaaaattatccagatggtggcacatacctgtggtcccagttactcgggaggttgaagcgggaggatcatttgagcacaggaggcggaggtggcagtgagctgaaactgcaccactacactccagcctgggtgacagagggagatgaccctgtctcaaaaaaagaaaaaaaaattttagcaagtaggcaaatttgcaaatacagaatccaagaataatgaggattggctatattttctaatatttccatactaagcttattgttgtaatttttaaatgaaagcacaaaataagctttcagaaaattaaagtacagcataatttggaagataaagctaaggcttttaaaataaatagaaagcattttaaaacacagtatattggccaggtgcggtggctcacacctgtaatcccagcactttgggaggccgaggctcgtggatcacctgaggtcaggagttcgagaccagcctggccaacatggtgaaaccccatctctactaaaaataaaaaaatttagctgggcttggtggtgggtgcctgtaatcccagctactcgggaagctgaggcaggagaatcacttgaacctgggaggtggaggttgcagtgagccgagatcacaccactgcactccagcctgggtgacagagcaagactccatctcaaaaaaaaaaaaataaataaaacacagcatattctcttatatgtgtgtacagcatattctcttatatgtgtgtacatctgagtatgggtagactaatgctacaacaggtgtttcaaagtgggaggaggctgggtgcagtggttcacacctgtaatcccagcactttgggaggctgaggtaagagaattgcttgagcccaggagtttgagaccagcctgggcaacacagtaagaccttgtgtctataaaacataaaaaaattagctgggcgtgatggtgcatgcctacgaacccagctgctcaggaggctgaggtgggaggattgcttgagcctgggaggttgaggcttcagtgagccatgttcaggccattgtactccatcctgggtgagagagtgagatgcagtctcaaaaaaaaaagaaagaaaagagggaggagtgcttgaggagaaagagagaaggcagagaagagaggtaggactgttcagttatattcattaattacaagacccctgtcaataaatcggaacaaactgaagccaggttaaaaataagtagttgtgaatactgaagagatttaccctgatcatttatcaaaaagatggctcttacctccaaaagcatgtgttttattagagtacagaagcatgttgaattaatatgtatggtttaatttaaatgtataaatttgggggaggaactgaaatttttctgtagcctgtgtttaagatcttgttaacttatttgtcttcctcagtctagctttgcctttttttacatatagacacatgaacacagacataaagataggtccttgtcaacaccaagttgcagagatacatgattgtcaatcaaaattctcaaaaattgtttctgttgtaggaacagcagcagtattggtatcgacagcacttgcttagtttgcaacagaggacaaaagttcatttgccaggacacaaaaagggtcctgtggtagcaaaggatacaccagagccggtaaaagaagaagttacagtacctgccaccagtcaagttccagaatctccttcttctgaggagcccccattgccacctccaaatgaggaagtgccacctcctctcccacctgaggaaccccaggtaaccatataattaattgtttgtgtttattaaattatttagcttttttctgattcatttagtatacttttatcataaatggatatatatttttgtttttttaggtacctataaagttgcatttgtgaaatcagatgtctgttgtatcaggtttatttgtttgtttatttattttgagacagggtctctctctgtttaccaggctggagtgcaatggtgcgatcttggcttactgcaacttctgcctcccaggttcaggcaattcttctgcctcagcctcctgagtagctgggatgacaggcatgcaccaccatgaccggctaatttttgtattttttagtagagatggggtttcaccatgttggccaggctggtttcgaactcctgacctcaagtgatccacctgcttcggcctcccaaagtgcttggattacaggcatgagccaccatgcctggcctgttgtatcaggtttagaaaaggaaatttttcctagtttgagtgaagagttggatactcttctgaattgagtgcctctaagcactaaaggaagatgccagcatatgttcatagtgacagcacagggcaatagttgagtgcttgagcttttagagtcaagctacccaggctataatccaggtactgccacttgccagtagtgactgggcaaatttgttaaccattctgtgcttcaatttactcctctgcaaaatgggtatattcaatagtagctatcatatagaggtattcaagcattaaatgtgataattcttgtcactcagcttagtgactggcacatgggaggttctcatattggtccaaaggtcattgttctcccaagagccttatatgaagggtttaatcaaaccatgatggttatattgtagtccattggtgaaaagtgacaaaaaaagaaacggatttttcatagagtgaaaaggtctataacttaaggttcactttttttttttttttttccagacagggtctcactctgttgcccaggctggagtgcagtggtgtgatctcaactcactgcagcctcagcctcccaggctcaagtgatcctccttgcctcagccttccaagtagctgggacctctcttccctcccctcccctcccctcctttttttttttttgagatggagtcttgctctgtcgcccaggctggagtgcagtgacgcgatcttggctcactgcaacctctgcctccaaggttcaagtgattctccggcctcagcctcccaagtaggtgagattacaggtacctgccaccatgcctggctaatttttgtatttttagtagagacggggtttcaccatgttgaccaggctggtcttggactcctgacttcaagtgatccacccgccttggcctcccaaagttctgggattacaggtgtgagccatggtgcccggcctgggaccactttccactgggaaaattgttgtcatatttaggaataataagattattattccagtgaagactatggaatttataaactcctttgtattagtatccataatagtatagatagagctatgtgttttatctaaagatagaatagctgttctcaatccaaaaagaactgaagatactgtgtttgacagttggatatttctgagttgtagggattctggactttataatacatttataaaatatttttgcttgctgttttatgacttacataaagatgtgtcctcttttatctttagtctgaggacccagaagaagatgccaggttaaagcagttgcaggctgcagcagcacactggcagcagcaccagcagcatcgagtcggtttccagtatcagggaataatgcagaagcacactcagttacagcagattctacaacagtatcagcagattatacagcccccaccacatatacaggcaagtgcttccatagtccacaataggaagttgccccaagacattgaaaggatttgttattcttgaaagatttaagtgtaaaaaacaaaagataccaactgttgacaattagttgtttcccaaggggtgcccaagtagttatctgccacattacctgggggactggggaggggttggttatagtagagtttcctgatcatgtcaacccaggccagatgttagcttactattgctaagggtcttaagagctggggatttttaccatatagctacaggttaacctgtgttttgcctgtaaactacaacagtaacagataagcaaagaggccaaaaacagccatcacaaaaaacctaagcaaatataccgtaaaagataaagtgacttagatacttgtttgtgttgtatctttgaggggtaatgttgtgtctgtatatctataataacagatcatttttcaagttcttgaaattatccatattaaaaacttgaaaaatacttattgctaagataggtatttgctttattgtttggttggtttttccaactctgtagtaagttgtctaagccaaaggaaggaagaagaatgatcatcactcaaagaacttaacgaacttattcttagcctcccaaagtctttagtgttctaatttcctaaagcgtcaaatgcccttgattcattaatattttaacctatgattaattatcttatatgaatggttttaaatagtttttatccctttatttgtagaccatgtctgtagatatgcagctgcggcattatgagatgcagcagcaacagtttcaacatctttaccaagaatgggagcgagagtttcagctatgggaggaacaactccattcctatcctcataaagatcagcttcaggagtatgagaagcagtggaaaacatggcagggacatatgaaagccactcagagctatctccaggagaaagtcaattcatttcagaacatgaagaaccagtatatggggaacatgtcaatgccacctccttttgttccatattctcagatgcctccacctctacctacaatgccccctccagtgttgcctccttcattgccaccaccagtgatgccccctgccctccctgctacagtgccaccacctggcatgcccccacctgttatgccaccttctctaccaacctctgttcccccaccagggatgcctccttctctctcttctgcagggccaccaccagttctccccccaccttccctgtcttctgcagggccaccaccagttcttcccccaccatctctctcttcaacagcacctccacctgtcatgcccctcccaccattgtcttcagctacacctcctccaggaatacctccccctggagttccacaagggatacctcctcagttaacagcagccccagttccaccagcctccagttcacagagctcgcaagttccagagaaacctagaccagcactgcttcctactcctgtgtcttttggttctgccccaccgacaacttaccatcctccgttgcaatcagctggtccatcagaacaagtgaattcaaaagctcctttgagcaagtctgctctgccatacagttcattctcatctgatcaaggacttggggagtcttcagctgctccatctcagccaatcactgcagtgaaggacatgccagtgagatcaggtggcctgcttccagatcctcctagaagtagttacttggaaagtccaagaggcccaaggtaggtctgcttttttttctctttttttttggtttggctattttattgacttaggctatttggttctcgatggtataaaaagcttcatttatacaatgtttatactctctttgtacttatattgtctgcttgttaagacatcacgtatgtaatctagaaaaggtaacatgcccccatttctttgatgtctctgcttttgtcctatatgtagagattataatccagaatgaatgtagtattgtagagtaatgctaatcattttgtattgacttattagctttaaaaataatattaaactttatcttttgtttgctttttcattcatttgacaaataattgaattggcaattactatttgttagataatttgttagttgttagagataaagatgaataagccaatattctactggcttgaggcagtgaaatttagcataaggtaagtaggacttttattttatccattcagcaaatatttaagttcctgctcttgtacttagagcagtgaatatagcagaacacataaaattcctgcccccatggagcttacatcctttatattttccccagttaaggagatacttctgtttatcctgaacaacatatttagaaagaaaaaaaattgctggtgtgtaagttttttctctttaccttctaaaaactgttaaattcattttttccaagtttgtaaaaatagatttttctccccaagttgacctaaatgataacttttctatggaaattattattattttttgagacagggtctcggtttttcacccaggctagtgtgcagtgatagaattatggctcagtgcagcctcttcctcctgggttcaagcagtcctcccacctcagcctcccaggtggctgggaccagaggtgcgcaccaacacatctggccagtttttaaaaaatacttcgtagagatggggatcttcctatgttgaccaggctggtctcaaactcctgggctcaagcgatcctcctgccttggcctccctgcctgccgtggcctcccaaagtgctgggattacaggtgtgagccaccacgctcagccagaaaaatactttaatcagtttttttctcagttgggaattgtagtagaaatgggtactccttatacaaaattcaaacattacagaaaagtgtagaaaaaagtgaaagtcacctaattccaccatctggagagaatcattttaaaaatatatgttgcagaaatgggatcatactgagtagattatcttataacttatttttccaccaatctgcgtattgcttagattttcatctcagtatcagtggatctacatcatcatttttttcaacctcattttaacatttgaaaacaaaatatatcttttattccccaagcttataattctgaaagcagtgtggcacaaaactccatccacaatcaaagttaagagaaagggcaattaacatgaattcctctgtgtaccaagaagccttgctagagactttacacacattattatctcatggaagtcttctcaacaacctgtgaagtaggcagattattctccatttactcttaacaaaatggcactgagaggactgcgtaacttgctcagtcaggattatttagcagagtgagtagaaccccagaataggtacagttgagtctagagggtccccaaagcaaaagtactatttaagctctgtttactgccatgattcaagcctatactgtcagtgcttatttggcatgtgtatcatcttgatttgaattcgttcttaatctcctggaatgagcattgccttttagatctggtaactaatttgctatcagagaagtacattcttaacacctcatgaaacatacatttcctgctcccttgatttccgtcatgttaatattttctctctttgcctactaaatcttggctgtgtgaatttaggacctattttaagttttgtcttcagaagaaaataacttctcaagttaataatctctgtgctgggaggatattagcaattatctaatatatctgtctacggcaacgcacgtttgtattccatttcagtttgtcacaatgagtcttgcacatatcatcttatttattcctcttagtgatatcaggaggtaaataaatacataagaaaagctgagattcagagaggttgtaaataccttgcctcatataacacagctagtaaatggtcaagatgagattagaatccaaggacttctgacccactttaagtccattgtactttctgtgatgagcagttgtatgcttaacattggcattgtgattaggaacactgccatataaggcattgattctagaaagtttgttttttacattgaacctaaatgtgattctttaacttttatctgttgattctagatttgcctctggagcaacacagaatgaattatcctatgcctcttctacagcatgtcactacagttatttaaaaactattaccctcatgtctccctcaccctacctcacccagtttgctctgccaatcacaactcagattcttttcatcttaacattgtttctaacctcatcctgctgtactgctcactgtcctttgaagggcctttagtttgttagtctccttcagaatgaacacttacttcagatgcagaggagcatgggcctagtaccaacttcattataaataatgtgcttatattgtatagcttaacaaattgcttttttgtttgtttttttcagcactctcacagtgttgactcttgttgaacttaacatcaatctagcttcccaggtctttttcacattagcttttattaagccaagtctctcttatcctgaacttgtgtggttggttttttgtttttgtttttcttgttcctttttctaagactttacatttctctttagattgttttctagttaggtttgcaccatcatttcagtctgctgaaatcttggtcaatgatgattatattgttttaggtatgtgatatccctcttcagcattttcatctgcagctttgataaggatggctttttaatccttgaattggatcctactcacattatccaccttgttttgaaaacgtttcccctaactagcttatgtcattgccatttcagtcaccccctgctgcttttgctcactcagcccttatagagtatagtttgggactgttacccaggcatagttctttttctccagtgtaactaggtaaaaaatcagtgggaagctggttagtgagtgaacaagactgaggtaagaataatctatactattaaggaaacctgtgaacttcttgtatttctaattcagattttgctatcaaacatataactgatatgagaagccactttttttaaataatcaaagctgattagaaaaacaagagtttagaacacaactaaacaaatttactgataacatgctgttacaaataaagtactgtaaatggctttgagtttttgcaaaatccagatttaagctgctttataaaaacgagatttctaaaaagtcatgtgacaaaactgcatgacatgtaaataacatatcacattgttgagagtctaggggagctgttttgacactgtgtatatcattggattcactcagtcttccagaagactaccgttggtccagaaaactgtcatatcaatggatgttggttttccaggaccttttttttcacatataataaaacttattgaaacgtaacagagaagtgcacaattttaagtgttcagcttagtgaattttcacaaaataaagacacacattggccaggtgcggttgctcatgcctgtaatcccagcactttgggaggctgaggggggagcggatcatgaggttaagagttcgagaccagcctggtcaatatggtgaaaccccatctctactaaaaaatactaaaattagctggcatggtaacatgcgcctgtagtcccagctacttgggaggctgaggcaggagaattgcttgaacccgggaggcggaggttgcagtgagccaagatcgtgccactctactccatcctgggtgacagagtgagactccgtctcaaaaaaaaaaaaaaaaaaaaaggcacacatggtatcactactagatcaagaaataggaattactggtgcccaagaaatctccctcatccccctcagttattttctaataccccaaagataactgctatactgagccatagattagttttgcctatttttgaacttcatgtgagtgaaataatactgtatgtactcatgagtctggcatctttcacttgacattgtattattgtgagagtcatccatgttgtgtgtagtagtagtttattcccgttcctgtacaatagttcattgtatgaatataacacaatctgtttatccattttaatattaatggtcattgaagttttttggttattatgaaaagtgctgctgtgtgtcttttgatgctgtatgtgtccctttagatgtatgtgtttgtttgtgtgtgtttaattttgtttggatatctattaaggattggaattgcctgattatagagtatatacatgttctgcgttaatgggtattgttaaacatttttccaaagtggttgtttcagtttatattctcaccagcagtgtttcagtgtttcagtttttttgcatccttatcaacacttggtattgttaaacttttaaggtttagcaatcctagtggatgtttagtggtatcatgataatggatttaatttacatttccctgatgactaatgaggtttcactttttttatttgattattgttaatttgtatttcctcttttatgaaatgctgattcaagtctttttcccattttttgactaggttttatgtcttactgattttgtaggagttctttgtgaattctacacatcagttttttatccattatatgtattacaaatttctcactgcaggactttttattttcttaatgagcacttgaatgtaaacgctgcatgctgggtacagtggctcatgcctgtaatcccagcactttgggaggctgacgcgggcagatcacttgaggtcaggagtttgagaccagcgtggccaacatggtgaagccccagctctaccaaaaatacaaaaattagctaggcatggtggtgcacgcttgtaattccagctactcgggaggccgaggcacaagaatcacttgaatgcagaggtggaggatgcagtgagccgagatcgagtcactacactccagcctgggcgacagagtgacagagcgagaacgagattccgtctcaaaaaaaaaaaagaaactaaacgctgcagtaagacagtttgatctcagtatagtagaaaagtagtctttaccgtttaccttttaggtccaatggaccctttgtattttaaagtttaaagtaattttacaaataatttacagaatttaagaataaaggggccgggcatggtggctcacatctgtaatctcagtactttgggaggcctaggcgagcggatcacttgaggtcaggagtttgagaccagccaggccaacatgggaaaaccctgtctttactaaaaatacaaaaattagctgagcatggttgtgcacacctgcaatctcagctactcaggaggctgaggcatgagaattgcttgaagctgggtggcagaggttgcagaactgcaccactgtactccagcctgggtgacggagtgagagtctgtctcaaaaataaaaataaagggatagtgaaaaaaatgttaaagacaaactcttttcatccattaaatttgggcacacaaacatcttaaaagatgaaataattctgtcacataccctttttttttttctttttttttgagatggagtctcgctctgtcgcccaggctggagtgcagtggcgcaatctcagctcactacaagctccacctcccaggttcacgccattctcctgcttcagcctcccaagtagctggaactacaggtgcccaccgccacgcctggctaattttttgcatttttagtagagacggggtttcaccgtgttagccaggatggtctcgatctcctggcctcgtgatccacccgcctcggcctctcaaagtgctgggattacaggcgtgagccaccgcgcctggccttctgtcacatatccttttagcaaattgagatggtccaggttcttgccacaaaatatgtgataagataaggtccttcctgtttaataactaagtgaattaccacaccacatttcctttctgttcttagaaatatattgtcagctgggcatggtggctcacacacctataattccagccctttgcggggctgaggcaggaggattgcttgaggttaggaatttgagaccagcttgggcaacatagtgagaccctgtctctacaaaaagtaaaaaattagccaggcttggtggcatgtgcctgtggtcccagttatgtgggaggctgaggtgggaggatcgcttgagcctgggaggccaaggcagcagtgagctgtgcactgcactccaacgtaggcaacatagtgagatcctgactcaaaaaaaaagaaagaaaagaaaccgtaaggctacaagtattattatttactttttcttcttttatttctttaaccttttatttttaaatcaatactccatataaaactgattttatatagcgtgaggtaggggtcaatgtttattttttccgaataactatccagttcaccccaacaccatttactgaagaagtcatccctactactttgcagtgacttcatcataaattcaatgtttaaatgagtttgtttctggactctccattcctgtggtctatttgtctgtctttgcattagtgtcatattttaattactgtagctttacaataaatttatctgttagtgtaggtcctccaattctgtgcttctagataagggattggcaagctttcttttttattttttcttgagacggagtctcagtctgtcacccaggctggagtgcagtggcgctcactgcaaccactgcctcctgggttcaagcgattctcctgtctcagcttcccaagtagctgggattataggtgtgcaccaccatgcccggctaatttttgtgtttttagtacagatggggtttcactgttttggccaggctggtctcgaactcctgacctcaggtgatccatctgccttggcctccctgggtgctgggattaccggtgtgagccatcatccctggcctggcaagctttttataaagggccaggtggtaaatatttgtaggccttgtgggtcacatttggtctctgttaaatatttttctttcttttcttttttttttttttttcacatttaaaaaaaattttattgaggcagggtctttactctgttgcccaggctagaatgcagtggcaggatcacaactcattacaactttgacctcctgggctcaagcagtcctcccacatcagcctcccatgtagctggaactgtagatgtgtcccaccatgcttggctacgttattttttgtagagatgggatctgcctgtgttgtccaggctggtctcaaactcctgggctcaggccatctgcccaccttggccttccaaagtgttggtattacagacatgagccaccatgtgcagcctttttttttttttaaaccttcaagaatgtaaaaaagatcacttttaactgtatttggaacataggccatagtttgctgacccctgttctagattgtcttgattattcttattagaatcagcttgtcagttttcaaaaacctgctagaattttgatgagcattgcatagaatccattgaccatttggaggaagaattgaaatctttataatatcaaggcttctgatcagtcacaactatgttttgactggctttaggattggaattgtggactttttccattctatagctatcttactaggattagtaagggactgtgagtgctataggttttctttatatttccatttgttatggttgttcttgtttatagtgataacttatctttgggaattttaattttaggaccttggttatacatatttagaaaacaggtgctatttcacgtgaaaagaaaacaggaaggaatttaattccaaaatttggtatcttgtaattcccatggtttgttaattttaatatgtttctgcaaatagtataatacataaaataccttctttaaaagtatttgtataactgcatcatacctcttaggtttttacattttggagttttatatcaaattttgaaatttttataattctaaggtatttatacctagttttaggggttttttaagagatttataacacacttaactatacaaataaacactttctaaatacttaaaaccagatatttgcttatttttctttttatcttaccaaggtacaatgcatgcgtttttatgtgattgtatttagtgaatttatgtaatgtttctactatattttaaatacatgtttttatatgtcaaaagggtcatagtatttcattatatttaaaggtggcttattttcatacagatttttaatatgagtatctcttgatatatttgttacaaagccttaaaaggtctctagttttataaatgaaaacggttttgagtctgtcattttgtaacatctttgaactttgaaaatttgaaagtccagtaatagacaggtgcagtggctcatgcctgtaatcctagcgctgtgggaggctgaggcaggtggattacttgagctcaggaatttgagaccagcctgggcaacttggtgaatccgcatctctaccaaaaatacaaaaattatccgagcctggtgacataaaaaattagccaggcatggtggcaggcacctgtggtcccagctactcgggggactgaggtgggaggatcactggaacccaggaagtctaggctgcagtgagctaggatcatgccacttcattccagcctgggtgacagagtgagaccctgtctcagaaaaggacaaaaaaaaatcaaatagtgataaatatttgccatttatatgtagtgttgaaagtgtatttcaaatggtttcaacaatttctggcccccagaatgaaaataaaatgatgggccttggctgttgatcagcaatttggtctgaaaacaaagcaccctaccctttcaacccttctgccatgtcctcttatctgcacaccttttaatgcctcctacttcctttgtcctttcttctggcttttacacatgctcttttctttgtctggaattcccttcttgccattctttgctttatttattcctatttttcctgccctggggcagcacttcagtaattacagattgggattatttaatgaaatcagacattgggaatactttggttagcaagacaaacatgttccatatttatcaaattctgttctaattgttgagttaattgtctcactcttcctgtggacagtgaactccttgaggttaggcatgactctctttttagcaccagctcattacctgacaatcagtatgtgttcagtgaaagttgcttcttccaaaatgtcagtcatggataaaattctcaaggcattcacaattttgttaggaagggactttgctcatatttagaatttgattagaatactagataacatgttaataaggtctctcatggactcttgtacattgtggaagatagtcttcttttatcacttatgtgaacaaataattgctacatttaatacatagcaaatgattttatacaactttaatgatctgatatattattgaggcactttaaattaataagtgtaattccgagaaaggaaccacaccttcacaagccctaaagcggcatacttttttttccttctgtaaatatatactctccatccttagcattgtgatgtatatactttgacaagtttctggtcaccttctttcgcctttgcccattatagctctgccaagccttcactacttcgcatagaccatctactctagtgctgctttctcaatcttagcaaacatttttattttgcattatatttataatttagcttcctgccttacaggaaatcaagtttacctatcaagcccagtaaaacatctcacttctaacccttagctttacttagcatgctcataatcttgtagtctcaggagaagcggcccttctgatgagagctaatcctctctctgtgccctttaaagagatacagtttacatttttatcaaagtgattcatatgcatggtttaaaaaaattgggccaaatggccacccactgctccatgccctccaaatgtttttgccaatggcatcctctttcaattatttagctgtttcttttggtcgccatcttcatagcactaaataattatgttgcccttttcactacttaaacacttacacattttagatattacatatttatttaactgtcctgaaaaataaagttttcgttcttcctcaacactctgccatatgggtgttaactacagcattccccttgctgaccctccggaatgtgatttgctgtttatcgaatctcatggcttcctgttaccattcagtacctccatttcctggagtgcatgctcaagtaacttgctaaggaagtgtgggtgaggggtaaattttctgagtcgtcctgtatctgacaatgtctttattctaatctcacacttacttgctaatttggatataaaatatgatgttgaagataattattcctcaaggttttaggatcattgttctattttgttctatcacattgtgtaggtgttatactgttctgattcttttcctgttttggtgacctcctctctcccaaacttaaaaaatctctggtattctgaaatttcagtgttttttgtttgcttatttagttttattattaattgtactgagtagtcagtatgctggcccctttctgtctagagattggaatctcttaactttgggacatttctttgtgctatttcttcattcattttttttctctcgttttctgtttctggaactcttcattagtaggattttggatctgttggattgattatctttgtgccttttatcttacattttgttgtacttcctgagatactttaacttctagtcctttattgcatcttttattttgagaattggaaatttttttttctgtggttcttctggcgttgatcttttttataaatagcacattgttcttgatttatagatgcagtctctttaagaatctctctgaggataacaatttgagttgaaagttcttttctgctttttgcattctgttttctccaaattcagatcctatttatttatctttagtttttctttcattttggacgtgttcctcaaatatctagcaatccttggctgtgcatttatgtttaagcatggaagacactgacaaactgattgggagctctgtgtatatgagaggggcttgttacctgtcaggtttctgctttatgtgaatagggtaaggaactgttactactgctaggggactctcaaattcaaggatttaagagacattcagcctaaggaaaggctggttgatggttccgaatatagatttacgtatttttagccccaagttttactcctttccttccctagcaccccctagtgtctgagaatcctgaccttctctgaggttctctgggcaagccagccttcttttgattttatccctttctgccatcagtactctaaactggtttcttcctgctctgtaagttaccactcatatttgttctttgtctttcagaatgtacaaacaagattttcatcttctgattacctcctctctctgtttattatgggtttgtgtatttttgagttccttgcaatgggtttgtaaaaggtcaacttggctgagctaaactccatttcccaaaattccctttctctctcttttttttttgagacaaagtctcactttgtcacccaggctggagtgcagtggcaccacctcaggctcactgcattctccacctcttgggttcaagtgattctcctacctctgccttccgagtagctgggattataggcacacgccaccatgcccagcttaagttttctattagtagagacagggtttcaccatgttggccaggctggtctctaactcctgacctcaagtgatccactcgcctccgcgtcccaaagtgctgggattacaggcgtgagccaccgtgcctggcagtctttcccatatgtttctgattaggttgggtcacagggagattttcacacctaacatgagacatttattgctggacaaccaaaaacattctctttccccagaaaagcacacaaagtcttttttttttgtctttaagataatattagttcatccttctccacctgattcacactccctctttcatgttctgtaacttaaatactgaaatataaggttaactcttattaacacatgttagataataaggaagaaaactaatgaaccaaaaaatatttggttaatacacacacacacacacacacacatatttaaacacaaatatatcaaattaaggaagaaatatttgtaactattgtagtccatatttctgcaatggtcatgtggtcatagctggtatatatgttcttccactactcattccatattccctttgctctaagtaagtacttcagccagttcggattccttgcctcatggggtgacccaggctttcattcttgaaagatatgggctattagcagttctttctgaattacttctgctgtttgcagttctacaaaaccctttgcaattttccgtggacttgaatctcaggacatgggaaatactaagagatgtcctagaggatctcttgcatttcagacacacttcacttcacctgtattgtgcaatagtcactcaaattcctcttgaaagttagggtcagttatccccagtgaatacagtaaccctctccattgcctcttgatttggaacttcagagtaaagttggggtctcaacttcaggttagtggaatcatttgttgtgtcccctagtggatgtgttcgtctctttgaaactagacttttagaacaacaaagcctaaagtcacagggataggaaataaatattttgccaacactgaatttattagtcttcattgatttcccaaagaaatgaaagaaaaagcctcctagcactcattaaaagtcatgaaaggcatcactgtctactactcagtcacctaagccagaaaccttggaatcatcttaaattcttcccttacaactatcattttatttctactggtgacaaaatcctatcaattctaccttattttacatctctcacttttatcccctcctctacattctcatatcagtcactgccttagactaggcatcaccttcacttacccaaattgtaaagatgatctttaaactttttgtctctgtccactatttttctgctaaagcaatcttttaaaaatcagactatatttagtggctctaagtgcttataaggtaacaccaaactccttaaccagctgaattaatttatctgttataatcgagatccaagtcagatggctttaacaagttagaagtttattctctcttaggacttaggtgatggttcaggaatccagttccttctgatttacctggtcttggatatttcaccaccatgtcagaaccagcatgaaaaaggaaatggagaagaggaggatgtgccctttcctttaaggggacaacccagaagatgtgcaaatcattttcactctcagctccttggccagaacttggctgccagttctagctgcaagagatattgagaaagagagtcttgtctggggggccttgtgtctagctacaggaggcctgttattgtagataagtggggaatgggtattggaagaccaccagtagtctctgccacatgaggcatacacaatcttctggagagtgatcctcgcttacttctttaccttattttttagtgtgctgcttttccacatttccctctttatcagctctcttgactctgtttcccctttgcattagccatgctaaactatttgcacttccaaacatgctctgctgatacacgtttctccgcctttcctcttgcttccttagcttgaggtgcccttgccacatactttcctcatctccaactcattctgtcagcttgatttcagagaagttgtcttttaaaactcaacataagcctctccaattctgttttccttattgtgtacacatagacttgagacattacatctcttggtacttatttacacttagattatctttatattttgttgtaaactctttgagggcacatatgacattttattcttgtatctcttggatgtaatgtaatgcctgacagataaaggatgtgtactttctttttactggatgagcaagtgggtttatagcaaaaataactgtgcagactttttaaaatgtcagaacctactcttaagatagggctactgtttcttttttttttttttttaacttttgtcaatcaaaatgttagtgctagctctaacaatatttataatcatcctatattttcttgttagtcttttcatatttagtttttagttacaatttaattccagaagtgctcagagttagttatggaatttgttaatttttttctctttaaaatgagcagccttttctgtctcctaaggcacagtatttataattgcttttttttttttttttttttgagacggagtctcactcttgtcacccagtctagagtgcaatagcgtgatctcagctcactgcaacctctgcctcccaggttcaagtgattctcctgcctcagcctcccaagcagctgggatttgcaggcacctgccaccacacctggctaaatttttgtattttttttttttttttttttttagtagagatagggtttcaccatgttggccaggctggtcttgaactcttgatctcaggtgatctgcccatctctgcctcccaaagtgctgtgattacaagtgtgagccactgcgccaggcctgtaattgctttttaaccgttcagtatatcagtgacttgcggcaggagatgtgttgaagtaagttagataatactgacatgatttccaaagcctgtcctaagaccttctgagcactgccaccttaacatactggttctaagatattggtgactcaggattaatttaatgactgaaaagagtcattgttgtaaacaaattctaaggcaagagtgccttaaatattcttacatggagaattttttttttctgctttactgtcttgagtaatatcttttgttttacttgtagatttgatggtcctcgaagatttgaggatttagggtcaaggtgtgaaggaccgagacccaaagggcctcgttttgaaggaaatcgccccgatgggccaagacccagatatgaaggtcacccagcagagggcactaaaagcaagtggggaatgattccccgggggccagcatctcaattttatattacccccagtacatccctaagtcctcgacagagtggaccacagtggaaaggccccaaaccagcttttggacagcagcatcagcagcaacctaagtcacaagcagaacctctttcaggaaacaaagaaccattagcagacaccagtagtaaccagcagaagaattttaaaatgcaatcagctgcattttccattgctgcagatgtaaaggatgtcaaggcggctcagtcaaatgagaatctaagcgactctcaacaagagccacctaaaagtgaagtctcggaagggcccgtagagccctctaattgggaccagaatgttcaaagtatggagactcaaatcgacaaagcccaagctgttactcagcctgtaccccttgcgaataagcctgtacctgctcaatctacttttccttcaaaaacaggggggatggagggaggaacagcagtagcaacatcatcattaacagcagataatgattttaaacctgtgggtattggtctaccccattcagaaaacaaccaagataaaggcctgcctcggccagataatagagataatagattagaaggcaatagaggcaacagctcatcttacagaggtcctgggcaaagcagaatggaagacacacgggataaaggtctagtaaacagaggtcgcggccaggcaatcagtcgaggcccaggattggtcaagcaagaagactttcgggataagatgatgggtagaagagaagatagtcgagagaagatgaacagaggagaaggtagccgggacagagggttggtgaggcctggaagcagtcgggagaaagtgccaggtggtcttcaagggagccaggacaggggtgcagctggcagccgagaaaggggaccacctcggagggctggcagtcaggagaggggacctcttcgaagggctgggagtagagagagaataccaccccgaagagctgggagcagggagagaggaccacctcgagggcctggcagtcgagaaaggggactgggaagatcagattttggtcgtgatagaggtccattcagaccagaaccaggagatggtggggaaaaaatgtatccatatcaccgggatgagcctcctagggctccatggaaccatggagaagagcgagggcatgaagagtttccattagatggtagaaatgctccaatggaacgagaaagactcgatgactgggatagagagagatactggagagaatgtgaacgtgactatcaagatgatacactagagctctataacagagaggacaggttctcagcaccaccatctcggtctcatgatggagataggcgaggcccttggtgggatgattgggagagagaccaggatatggatgaggactacaatagggaaatggaaagggacatggacagggatgtggatcggatttcaagacctatggatatgtatgatagaagtttggataatgagtgggacagagattatgggagaccactggatgaacaagaatcacagtttcgtgaacgggatattccatctcttccacctttaccgcccctcccacctcttccacctttggatagatatcgggatgatagatggagagaagaaagaaatcgagagcatgggtatgatcgagatttccgtgataggggtgagttgaggattcgagagtatccagaaagaggagatacatggcgggaaaagcgagattatgttcctgacagaatggactgggaaagagaacggttgtcagacagatggtacccatctgatgtggatagacattcccccatggcggaacatatgccctcctcacatcattcctcagaaatgatggggtccgatgcaagcttagactctgaccaaggccttggaggggtaatggttctcagtcagaggcagcatgaaatcattttgaaagctgcacaagaactgaaaatgcttcggtaagttgactccttcagatcctttcttttaataaaaaccacattcagactgctctttttaaagtgatatgatatatttgaatggaatcattttacttcaagttcttatcacatacttttaatttatatttctggtcattcagtgctgttttagggttagaatgggtatttaggaactgtgttaatgataaacttatgccctaagatgtgaaaattgattgctgtcttggcctttgtagaagtgttgctggcatgccatgcctgtgcatgtttcaagtgtcaaacttcaacttttcagtgctctggatttcacagggttcatgtgtaaccttcattttttccagtaatcagtttgttctttggtattagatctgatagactttatattcactaatcattgataaaactttggaaagtgctgtatttttctttgttgaagctaagaatggtttgcttaggagcatcctcagatttgtcttaactattgatactttcttttggggatgttttatctttcattataactaaaagcagatatttctccttgaggatgttatttgtttctacataaccaaatgttttctttgtgaaatggaaaataggatttcttgacttacaatcaactgtgtataggtatctacataattttcctcttttcttgtggtaacaacaataacaaaagctaacatttattgcatgcttactccgggccaggaactgtactaagtgtgttgtgtataataaactcatttaatccttaaaccagctgtatcttgggataggaatttagaagtcagtgacagattgaaaacttttttaaagcaatttttttgagaaagtcaattaatgattaggttttgataaattccaatgtatttcttccatttttcaattctggtttacatttgtggatcttaacaataaattataacttaaactttagaactaggaaagaaaaatacggtgaagaaaaggtaatgatgaaagaccagatacggcaggtttgtatggtctatagctaagaggtttattttttccagattactcatgaagaaaatgtggaaagcatgctatagaatatttagctactacactattcacttttaagttatagacacctttaattttaacacctaccgtgtaactgggcacttgctaataattgagtgtatattatgtcagtctgtctatctcaaaggcctgcaaagataaggtagtattatccccacttcacaaatgacactaaagttcaaagaggttaagttcccttggctagtaagtggcaaacccggcctttgaactcaatctgtctaaaactctaaaatctgtgttatttatggagaataccaagctgattggtgttgttaagctgccaaggtttctttttttttcctttttaaatttctttttaattcgttattgctttgcatggtaatgctggataaaaggtgctgctgctgcttcatccttttttaaagctttctaggcaacatgaacataattaaacaatatatagggagtgatggataatgtcatagccgaatacaagtcgtttatgttgtgtcagtgtaaagtcgtaaggagtatcataagggatgtgatgatgggatttacctgagcagtaaataatcttacacacttgacccttactttgtggtccctcatttgtggaccctcatttgggtcactttaatgtaaggagaaaattgtaaaaggtcttaagaaattgtagtggattttacctatgtttaaggtaggcattgtgaaaaaaagtaaaaggaatttcgtcagtttaaagaaaaaaccgaaggattacataattatcttcaggaatatgaaatgttgtttttaaaggtatagactgacagttgttctcaccatctacagcaggggccataaattaaaatgtccccaagaatcagataacaaaaatgagtgaaagtgggccaagtataactctgtagagtacggtgaagattgtgacaggttgtttcatctaacatgggcagcctctactgcactcagctgattgttggcatgtgggaatgtaggcctggtgttaccatatctctttaagatttgaatttatatatgaaatattttgctttgtaaatatgacagctaatttcaaattttaaaaactgatgtgaaagccacattttgaaaacctttttaggccatatttggcccatgggccaccattttgcaacctctggtctaaagagttgaaaaaaataggccgggcgtggtggcttacgcctgtaatcctagcactttgggaagctgaggcaggcggatcatgaggtcaggagttcgagaccagcctggccaatatagtgaaaccccgtctctactaaaaaaatacaaataattagccgggcgcggtggtgcatgcctgtagacccagctactcgggaggctgaggcaggagaatcacttgaacccgggaggcagaggttgtagtgagctgagatcgcgccattgcactccagcccaggcgacagagtgagactctgtctcaaaaaaaaaaaaaaaaaaatagcaagagagcttttggttggattaaagaaaaacataacaagtagatgagatagtagaaaacaactgaggcaggttgtagaatctattcttgaatatcttcaataatttataattatttatatgtcttaaatgactgatgagttagctacataaaagcaaaagagggtaatcctggagctgctcagtgtatggccactgcagagaattttaggacaaggattttttaggtctcctttttttaattaaatattaattgtagtcacttaggaatggaataagcatgctttatgtactatgtcaattttatttgtttgcagggaacagaaagaacagcttcaaaagatgaaagacttcgggtctgagccacagatggctgaccatctaccacctcaggaatcaagattgcagaatacatcttcaagacctggaatgtatccggtatgggagaatgtgtgctcagaaaatgaaatggtttctactttgtatgtttctatgttgtttgattttttttagaagttgaataaataacaaatttcctctataaaatgtaaattttggaaacttaaaagtttatggtaattgaactttgaacaccttaaaagcatgttcaaaagtgtggtagagatgctccttttccccagattttgataagtacaccaagtacacctgaactacatagcttctgttcacaaaatggtagaatttttctaataatttttatgttaaaatagtcctgttggctgggcatagtggctcacacctgtaattctagcactttgggaggctaaggcgagaggattgcttgagcccaggagtttgacaccagccttcgcaaaatggtgagacccctatctctaccaaaaaaaaaaaaaagtcctgttttccatctaggcagggctagatgtgggcctcgtgatgcttcctacctcttcaggctactagtccttcagatggggaaatgtcataccccagtacatacttcagaactgttcaggcagtatgaaaaggggtgtttatgttaaagacttgagtaattaagttctcctttttttcccaagagcatgccaggacttcttttatttttgttattttacctttaagccagtaatgggcttttcaaatgtttaaaatgttatcttgcaggtagttttatgacagcataatgaagaaaacagctctactgaacctctactgaaccatttcatcaaattaacacttttcatttctcagtgttcccttccatcctggtctaatacttaacagtaagacatagttgttgacatcagtgaccaccatggtgttgttgactccccagatcggatctcctgacctttgtacgcatctacctgtctgcagggtttctgtctgtggatgtgactcctgtcaaatgcagcatattcaaaatggggctcgttatcataccccattaaattgtcttttttcctcaccatcacctagtcaccctaacttgaaacctgaaaatcaaccctccatcttgctccatcttgctgatttgtcctaccctgctgctgattgattttacctcctttgaatcaaattctcaagtataattacacccattttaagcctatagttcgagttttgacagatgtataccaaaagataaaaaaattctcggccaggcgcggtggctcacacctgtaatcccagcactttgggaggccaaggcgggtggatcacttgaggtcgggagtttgagatgagcctgaccaacttggagaaaccccgtctctactaaaagtacaaaattagccgggcgtggtggcgcatgcctgtaatcccagctactaaggaggccgaggcaggagaatcacttgaacccgggaggtagaggttgcggtgagccgacatcgcgccattgcactccagcctgggcaacgggcgaaactccatctcaaaatcaaaacaaaacaaaacaaaattctcatcaccctaaaaagttctctcatgcccttttgagattgggactacccctatactccacttcaggcagcgtcgatgtgatttgtggccagatggacattttaaaacaaatctcaccatgtggctacctggctttaaaacttcaatgttctcccatgccttcaggatgaaatttagaatctcttgcatgactttcttgttcttcctgagctggcctgacctctgctgaccattgcttgctactccactctctgatgcttcattttccctccacatagagctacttaacaattttgtgaatgtgctagattcttttacttcttcattcctttgcgtatgcatgttgttctctaagcctagagtcttttctttgccttcccatcccctcctgcaactggctaatgtttgtttatcttttacaactcagctctactattttctcttccacctatgtagggcaattacccttgtacataccctgtaacatcttgtactagtctttgttgtcatctttattatgttgcattttgagtgtctgttttcttgtctttctttctaaattgagtccataagataataactatatctttcatctttgtgtgtcttagtaaatagaagcgccagattgtacatccacatttctgctttatttgcttaacaaatcataatcatctttccatattgttatatgctatattattttttgatttacaataatttattgaattaattcaatttctgttggaatttgtttctaatctttcactgttattcttaatattaccctaatgaatgtctttgtattgggttcttattttagataactccttttcttttttccttttttttttttttgaaatggagtctcactctgttgtccaggctggagtgcagtggcatgatttcagctcaccgaaacctccacctcttgggtttaagcgattctcctgcctcagcctcccaagtagctgggattacaggtgcctggcaccacacctggctaaattttttgtatttttagtagagacagggttttaccaattggccaggctggtcttgaactcctgacctcaggtgatccacctgcctcagcctccgaaagtgctgggattacaggcatgaaccaccgcacccggccaataacttcttaggagtaagttttatgtttttgttttgtctctttttttttgctctgttgcctgggaggctggaatacagtggtacaatcatagctcactggagcctcaaactcctgggctcaagtgattctctcacctcagcctcctgagtaactgggactacaggcacacaccctacgcctggctaataataaaaaaaaaaaattgttagtagggacagggtctcgcgttgttgcccaggctggtctcgaactcctgggcttaagtgatcctcatgccttgtcctcccagagtgctgggattacaggtgtgagcccctgcacccagccaacagtgattttaacgtcccaaagtgggacacttcagtcaaagaataagcatactttttttttttttttttgaaacggaatgtagtctgtcacccaggctggagtgcagtggcacaatctcagctcactgtaatatccacctcccgggttcaagtgattctcctgcctcatcctcctgagtagctgggattacaggtgcctgccaccattcctggctcattttttttgtatttttaatagagatagggtttcaccatgttggccaggctggttttgaactcctgacctcaggtgatccacctgcctcagcctcccaaagtgctaggattacaggcatgagccaccacacctggcccagaataagcatactttttaaatgattcctgtcacatagccaaacagctctctataatagttgtataatggccgggtgtggtggctcatgcctgcaatgccagcactttgggaggccaaggcaggtggatcacaagaggtcaggagttccagaccagcctggccaacatggtgaaaccccgtctctactaaaaatataaaaatcagctgggcttggtggcatgtgcctgtaatcctagttacaggtgaggctgaggcaggagaatcgcttgaacctgggaggcagaggttgcagtgagccaagattgcaccactgcactccagcctgggtgacagatcaagactctgtctcaagtgcatcacctgaggtcaggagttcaagaccagcttggccaacatggtgaaccctcgcctctactaaaaatacaaaaattagccaggcacgcgccaggtggtgcgcacctgtaatcccagctactagggagactgaggcaggagaattgcttgaacctgagaggtagaggttgcacatagcgccactgcgctccagcctgggcaacaagagtgagactctgtctcaaaaaaatatataaataaataaatgaaaaaaaataattgtataacatctatactatagcctcgtaagcattagctacttaatatttttggtatatttaataattttaatacagcatttttgattactagtgaacatgaatattttcccatatttgttaattatactttcctcttacagaaattctgtttgtgtccttcacccatttatctgtttgagtcaggttttttttttttaaattaactcattatccttaatataatatagatattaaccctttctcatataaacaataattttaaaaaatgtatcttttactttcactatatagaatgaagaaagcagtttttaaaaaatttataagtatacatctatgagatcttaagatatttaaaacttgtcttgatagatctacccagactgaatagcttcatcctatattggcattttcttgacaaagtttaccatgccatactttaaaagtttacctttaggtaatagccatttgtctttaactgtagccagtagttacctccagtcaaataatgttccttctgtattagtcaactccattttattattcagaaagtttatttttaaagtactgtgtatatatgggcaaatatataaataatgtatattgtgggctctccaggatctaaaatagcgtcaataaagaaaaaacatcctagaataacagagaagtaaaaaaccaaaacaaaacaaaaaacaaaaaaataaaaccaaaccagccagacacagtgaactaagaaatgggaagtaagtgtttgaatcacacttacaaagattaaaatagagactaggcatggtggctcacacctgtaatcccagcactttgggaggctgaagcgagaagattacttgaggcctggagttcaagaccagcctgggcaacatagcaagaccccgtctttaccaaagaaagaataaaaataaaatgtatttggcaactgggtttcaatattgagtagataggaccaatttgctaagaagtcctaccatctccatcatagacatttctgatggtaactggtgatgctttgggaaaacaaatggaaggagggcacacaacagtggcactccttagattactagatgttcatttagtttattttgttgtttcatagtactcatgttctctgttggtctcagcttcaccacagatgactattgtcaaccagataactgaaaggaacagaagtgtggaggctatctaggatttctctcactgaaaatttactgtttttgtggaggagataggtctctagagtaggaagatagttcttatttatttattcatttctctccttcctgcacactgagcataggaagatagttcttaaccgagggttataaatcagaattattcatggagggtttttttaaaattttgaattactggtgggaccccacctacagaagttcagtagatttggtattggcctgggacatttgaatcttacgtggctaccaccctaatttggagtatggaaattttaaaacgttttcattacccctgtaagatcactgcaccagtttacagttagttaatcctcattcctaccccagtcccagcactttctgtctatatagatttgcctttctgggcattttgtataaatgaattatataatatgtagtcttttgtgtctatcttcttttcaaagtttacccatgttgtagcatgactcagtacttcatttctttttactgctttttaaatttctttttatttataacctgttacatgaatataccacattttgtttaaccattcaccagttgttggacattagggttgttgaatagtacggctatgaatgtttgtgtgcaagtctttggatggacatatgtttttatttttcttggatagataccgagaaatgaaattgctgagccatatgataaatttatgtttggccgggtgcggtggctcatgcctgtaatcccagcattttgggaggctgaggtgggtggatcgcctgaggtcaggagttcgagaccagcctgaccaacatagtgaaaccccatctctactaaaaatacaaaaaatcagctgggcgtggtggcgggtgcctgtaatcccagttactcagaaggctgaggcaggagaatcacttgaacctgggaggcagaggtggcagtgagctgagatcgcgccattgcagtccagcctgagcaacaagagtgaaactccgtctcaaaaaaaaaaaaaaaaaattgtgtttgactttttgagagaaattggcaaagcattttctatagtggcaccatttattcccactaacaatctaaaagggtttttctttcctatatccttgccatcatttgtttttgtctgtcttattaattataaccattccagtgcatatgaaaatggtatctcattgggattttaatttgtgtttccctaatgactaatgatggtgagcatcttttcatgtgcttattgggcatttatatattttctttggagaaatatctattctcatcttttggccatagtttttttttttttatgatttgtcttaccgagtttaagtgttttgtatattctgaattcaagttctttatcaaatataagatttgcctatgttttctccctttctgtggcttgtcctcattttttttgatggtatgttttgaagcacgaaattttgaatgagtccaaggtgttaacttttttcttataaattgagaaccagattttaatttccactgatctataaaaacatagtggtatacttgtccactaagctatttattctgttctctagcctccagggtcgtatagacctccccctcctatgggcaaaccaccaggttcaattgtaagaccctctgctccaccagcaagatcatctgttcctgtgaccaggccacctgtcccaataccaccacctccacctcctccacctctacctcctcctcctccagtgataaagccacaaacttcagctgtagaacaggaacgatgggatgaagattctttctatgggctctgggatacaaatgatgaacaaggactgaattcagaatttaagtcagaaactgcagcaattccatctgctccagtattaccacccccacctgttcactcttccattccccctcctggcccagtgcctatgggtatgccaccaatgtccaagccaccaccagtacaacagactgttgattatggccatggccgaggtgagtaatgatagtgcacttgtatttgggattctacaggaattgttagcttcagctttagctttctctagcttcactcttacagtactttatctctgattttgtttaccagatatatccactaataaagttgaacagataccttatggagaaagaataactctacgcccagatccactacctgaaagatcaacttttgagacaggtaggattcccagagaggtcagtatttttaaacattttagggcctaattatcacatgattttccttttggtgagattatctgagcctccatttaatacagctaaaagattcttagttgaatttatggcaaaaatttataccagctctgaagttagatttatagttttctgcttttatttctataaaagggatatagttattttgtactaattgtttttgtagagcatgcaggccaacgtgatcgttatgatagagaaagagatcgtgagccttattttgatcgtcaaagtaatgtcatagcagatcatcgagattttaaaagggatcgtgagacacatagagatcgagaccgggatcgtggtgttattgactatgaccgggatcgatttgacagagaacgccgaccccgagatgataggtatgctataaaacaatctttgctaggtgtacaaattactgtatacttaacagtaaaagtttaagagaaatttaataagtaacatattcttctcatgcatgtgtatatgtaatttggagggggaagaacaattctggaccagttttcaggaaagtaggtccttgacttggtagcttgaattccagagaattaaatgggagatggagatagccagaagggaatggaaatggtattgtcaataaaggtgcagtcatactcagtaggcaagcaatttatttttgcaattcatgagctttttatttattattattattattattattatacctaagggcattctggcagccagccaaggaaaagggaaaggggggcaagcccatgaactatttatttatttattcattactattttgtatggagacggggtctctctcagtctgtcacccaggctggaatgcagtggcgcagtctcagctcactgcagcctccacctcctgggctcaagtgatcctcccacctcagtctcctgagtagctggggccacaggcatgtgccaccatgcctggctaattttttttttgtttttgatgacgatgtggtttcaccatgttgcccaggctgatctcaaacttctgagctcaagtgatccacctgcctcggccttccgaagtgctgggattataggcgtgagccatcatgcccagctttcccatgaacttcttagatgtatgtatataaagtaaatctaaatgaaaaagcaaagtcaaaatgtaaatattggccgggcgtagtggctcacgcctgtaatcctagcactttgggaggccaaggcaggtggatctcttgagctcaggagttcaagaccagcctggccaacatggcgaaaccccatctctacaaaaaataacaaaagttggctgggtgtggttatgtgcacctgtagtcccagctactcaggaggctgagatgggaggattgcttgaacactggagatcaaggctgcagtgagccgagatcacgccactgcattccagcctggttgacaaagtaagaccccaatctcaaaaaaaaaaagtaaacatttactgtgtggagtaccttcctatagagaaaattgggcagttaatgctgttgcgttataaagcagagaaccccaaatattttttatttgctgaagcgcttcctattacaccttctagagctcagtcatatcgagacaaaaaagaccattcctcatccagaagagggggttttgataggccatcctatgaccggaagtctgaccgaccagtctatgaaggaccatccatgtttggaggtagagtgatgccttattaactacaaggatgttgagaatgtaaagcatgggagatgctttccattgtagctatgaatttaaacttttagagtaaaacgtattcacagatttcttagagctggtggcattgtcctaaaaaatagcagtgtaattaatgaaataaagcatgtttatttttaaaacaaagtagaatcaaaattactgatagtctcactacctaccatactacagctattataattttgtagctttcctctcattcgctctttacagacatatttatgaagttgtaatcaaagtataataatacaatttctttatcgtgattgttctgattgatattgcaccatacacatttttcatatgtaaacctattttattaatggctctgtgacattccattgagtggataaaatataagaccaagacccttattcttagttatttaggttgcttttagtttttcactgctatgatttacacttaaactagaaactcatacctatttttaggaacaggctctcctaagatggtataactcttactcttaaaaccataaagcagaagttacagaacttaggactatccagcaaagcatttattattcttccatgtcctgttgcttaactttcctacatttaatacaaacaaggatgaattcagtgttttgcagaacattctatttgcctgaaatcatacttaaatcttctcattttcttgacttcagtagattttacattaccttaaattttctctaattaaagttaaaagtggccccaaaatcactggacttggtttgaattatattaccttaggatgtgtggggagagttgaatttcaaaataattactctacaaatagtaattttgttcaactgctggaatcctaggagaacgaaggacttatcctgaggagcgaatgcctctgccagctccttcactgagccaccagcctcctccagctccacgagtcgagaagaagcctgaatcaaagaatgtggacgatattttgaaaccaccgggccgggagagcagacctgagagagtgagtcctatgaagttgattcgtcttcgtgcaaaccagaagataagagatcttgttaatatcctgaaaagaatttctttatttttctgcaacatagtaataatatcagattcaagacgttttactatctctaaatcaccatataatctcataaatggcctacactatagaatctttaagaatttagcactaaagtacttggcaaaaaagatgttgaattttaaaacatattaatgagacctcaattaattgcgcgttgaagagaggaaaagtggatttggttttatggtgtgtggaatagaaagggagaattaggagacttgattagcttaggcttaatttcctagtgacctccaaatgtgcgcattctattaaatttgtcttattacagaataattagactgactccatttgaattaactggtactggagatttcagccagatattttaattccatatatacagaattaatagattgttgttttaaagtctttttgcctactattactatatagctacttgacctttcctgtggttgctgtttgcatgataaatcttttaccatttccttcctttcattctatttgtatcttttaatgtaaagtgtgtctcctgtagtatgcctatggttggatctttttttttttccattcaggttccctttatttctgacatttcttcaccatccttgcaagggtaactccctaatcactctagaaattcagattcctgtttctgactccgtaggacacagcggatcgtgttttttaatgcagtctgaaaatctctgccttttgattggattgtttaatacattcacattttttttttaaattatggattcaggatacatgtgcaggttcattacacaggtattttgtgtaatgctggagtttgggcttctaaagagcctgtcacccaaaaagtgaacatagtaccctgtagtaaagttattattgatggcttaatttcatttttggattgttccttgcaaatatatggaaatatggtttatttttgtttattcgtcttgtatcctgcaataccactgaattcatttattacttttagtaggtttttagttgattcttaaggttttctatgtataagatcatgtcatctgcaaatatacttttacttctttctttctgaattgaatgccttttatttcttgcctaattgccctggctagaacctccaatgcagtgttgaatagacatggcaagagtggacattcttgtcttgtatctgatttagagagaaaaaaatacaatcttttaccattaagaatgatgttgctgggtgtggtggctcacgcctgtaatcccagcactttgggaggctgagatgggcggatcatgaggtcaggagattgagaccatcctggctaacacggtgaaaccccgtctgtactaaaaatacaaaaaattagctgggcgtggtggcaggcacctgtagtcccagctactcaggaggctaaggcaggagaatggcatgaacccaggaggcggagcttgcagtgagccaagatcgcgccactgcactccagcctgggcgacagagcgagactccgtctttaaaaaaaagaagaatgatattagctgtggaatttttttgtagatgcacttcattaggttgagaaagttcccttctattcctagtttgttgaatgtttttatcatgagaggatgttggatttgttgaatgctttttctgtgtcagttgagatgatcgtgtgattttggtttttagtctgttgatatgatgtgttacattaattgatttcatatgttaacttgcattcctgggataaatcccacttgatcatggtgtgtaataatttttatatgttgctggattcagcttgctaatattttgttgaggatttttgcatccatattcataggagatattgtagttttcttgtctgtatgtggtttggtgtaatgctggcctcataaagtaagttagaaattattccttcctattctatgtttttgaagaccttgggaagagtcggtatttaaatgtttggtgaattcagtaatgaagtcatccaggcttaggcttttctttgtgtgtagttttttaaaattattgtcttagattcttcacttgttataggtctattcagattgtttatttgttcttgagtaaattttagtagtctacatctttccaggaatttgtctgtttcacctaaattatctaatttgttggcatacaattgttcatagtattcctttgtaatcttttttataaggttggtagtaatgtctcctccttcatttcttttttactcgaggcagagtctcactattgcccaggctggggttgcactcctgggctcaagtgaccctcctgcctcagcctcctgaggaactgggattataggcacatgccactgagcccagctttcatttctgattctggtaatttgaatcttcttttttttctattcagcctaggtaagagttcatcaattttgttgatcttagtcaggcgtggtggctcatgcctgtcatcccagcactttgggaggctgaggtgggcggatcacttgaggctaggagttcaagaccagcctggtcaacacggtgaaaccccatctctactaaaaacacaaaaattaggcgggcgtggtggcaggcacctgtaatcccagctgcttgggaggctgaggcatgagaatcgctcaaacctgggaggcagaggttgcgatgagccaagattgcaccactgcactccagcctgggcaacagagcaagactccatctcaaaaaaaaaaaaaaaagttggtctttttaaagaaccactgccaccgtttggttttattgactttttctcttttgtttttctgttttctattttattaacttctgctttaatctttattgtttctttcctctgtttctttagtttgctcttctttttcaagtgtcttaaagtggatggttaagttattgatttgagacctatttctttcctactataggcatttatagctatcaatttccttttaagcactgctttagctgtatcctgtaagctttggtgtgttgtgtttttttcattcatctcagagtattttctggttcctcctggtttctggctcctcttgatttctggttcctcttcattttttctttgattcattggttatttaggagtatgttgtttagttttcacgtatttgtgagtttctctaattttttcttactattaatttctaatttcattccactgtggtccagtgacatactttatattatttctgtcctttcaaatttatgaaggtttgtttcatggcctgttgtatagtctatcctggaaaatggtaggtcattgttaactgttatctcattgcagaaaattttctctcagtgatttttttttttttttggtctattctgtttcagattgttgttataatgagaggattacctggcagtggaaagacacatgttgcaaaacttattcgagtgagtatggggaagctgaaaaatcagctgcttgtgctgcttgtgttagtagtcacttgccttcttattaatagcaagcaacataatgccaatagaattgtcttccatttgatccattacagttggcccatgtggtagatgttgtcccatatatatttttatctactcagagaaacatttttgcctctgcttgatttgaaaccaccagaagattgtatattatttagccacaagagggaactttggtgtgaacattaatttattccataaattcgttttaaccttcttgactgtatgattcttaggataaggaggtagaatttggaggacctgcacccagagttctaagcctggatgattacttcatcactgaagtggaaaaagaagaaaaagatccagattctggaaagaaagtgaaaaagaaggtatggtattcatctcagatctcgttctgattcattaatagtatttaaaggaaaatgtgtttggagagaaatgtggcttttttgagggcagggacctctctcttttccgaacacagtactttagtacttgggtgtgaaggaaagactacaaagtcatctctatccaaatactaaccaaggaaaaggttttggatgattctttgcttttgctaattccatatctcttttgggggaccttaggtaatggaatatgaatatgaagctgagatggaggagacttaccgcaccagcatgttcaaaactttcaaaaagactctggatgatggcttttttcccttcatcatcctggatgccatcaatgacagagttaggcattttgaccagttttggagtgcagcaaaaaccaagggatttgaggtagaagcttaaagaactttaaagtactttgtgttgtcatgtaaatgttatatatctttgcctaattattattcattcttgcttaggtatatttggctgaaatgagtgcagataaccagacttgtggcaagagaaatattcatggaagaaagcttaaagaaataaataaggtgattttaagaaacatagaataatagagtactatcatgcgctgcataatgatgttttggttaaggaaggactgcatatatggtggtcccataagattataatgtatttttattgtaccttttctgtgtttagatatgtttaagtacacaaatacttcattgtgttgcagttgcctacagtattcagtacattaacatgctgtacaagtttgtaacctagatgtgcagtaggctttatcatctaggtttgtgtaagtatactccatgatgttcacacaatgacaaaattgcctaatgacccattcctcataatatatgcccattgctaagtgatgtgtgactgtactctaaacctcatattatctgtatcagcactcttgtctggaagctcttgtttatctcctttttttttcataataactttcctatctgctttagtaaatgtttctcttcctttgtttcttttcctagctcttcttgaaattagcctgttatggcctggcatggtggcttaggcctgtaatcccagcactttgggaggctgaggtgggcggatcgcttgagcctgggagtttgagaccaacctgggcaacatggcgaaaccctgtctctacaaaaaaatacaaaaattagctgggcatggtgtcatgtgcctgtggtcccagctactggggaggctgaagtgggaagatcacttgagcccaccatgtcaaggctgcagtgagccatgttggcgccactacactccagcctgggtgacagaccgagattctgtctcaaaaaaaaaaagaaattagcccattagactttacaatattaaattaatatttaacaaatatttaattaatatttaacaatattttaaaatattgttaaatgttgtttatcttggatgcttacttggtctttgagtagtttctagagataactcaaccatctgaatttttcaatagatggctgatcactgggaaactgcacctcgtcacatgatgcgtctagatattcgttctttgctgcaagatgctgctattgaagaggtgagtatcctttggttcaaatgcaatgcaaagtgatgttactttttcacctttttactttgaaaaacttaaaacctacagaaaagttatatgaatagtattcatacaagaacacctactgatatgcctttcattgagatcacggttagtattttgccacatttttctctgaatgcatgtattcttattaacattcttgttaatgatgtcactgtttttgtggaaccatttgagagttaagttgcagatcttataaaccttcacccttaaatacatcagtaggtatcttgtaagaacaagtacattctcttttgatttgatgacagttatcaaatgcaggaaatttagtattgataaaatactatattaagtaatataaatttcctgaattaaatttcttgaattatctcacatatagtttatattcacattttaccagttgtccctataacgtggtatatagaaattttcaaaaatctaagattcaatcctttaatataaaatatagtttctcagccttgtcattgtcatgaaagataaagaatttatgaagagtataggcctgttttgtagaatgcccctcaatttgaatttgtctgtttgtttccacatgcttaggttcaggttaaacattagcgggaatgctacataagtgatactgtgccctctcagtgtgtcacatcaggagccatatggtgttaatttatctcattattggtgatttaagcactgattacttggttaaggtgatatccatcaaatttttctacctttttctctttgtgataagtaatctgtagggagatactcttaatatcttttccccaacaaattttcattcactggtaattcttgcctgaattaattatttatttgatggaaggaaaaattttctattttttaccagttgtaggtttctgtttgtttgacctcttccatactcaatattgtcattgtgctttttttttttttttttttgaggtggagtctcactctgtcacctagattgtagtgcagtggtgtaatctcggctcactgcaacctccgcctccagggttcaggcgattctcctgcctcagcctccttattagctggaactacaggcatgcgccaccatgcctggctaatttttgtatttttagtagagatggagtttcaccatgttggccaggctggtcttgaactcctggcctcaagtaatctgcccacctcagcctccgaaagtgctgggattacagacgtgagccaccatgcccaaccgtcattgttcttttatgtgtttttaattcccatgccatttctcaacccatttttttctggcttctgccactaccattgtctggcaactctttcactaatgatttccgtggcagtggacagttctcatttcctctattgattaattttgtagccacatgtaatatagttgaccatgcccaccttcttaaaaaacatatttttctcttggcttttgtgaattcacatttttctggttttccttttacttttttggctatctcttttcagtctccttcactggcttctcctgcttctcactctttaaaagggcccccttagggctccatcctaggctctgtttttattttgtaccctctgtatagatcatctgaatctttccggtagcttagattgtcacttacgtgccattaatgttataaagtctagattgaattatattactatctaaatagtagtgtttctgaatggagggagtataggtgatttttataatcttctttttactattattttccaaattctctacaaaaaatatatattatcttagtatacctcaaactcaacctatccaaaatattgttcgtccaaacctgtttttcatttagtagtctctgttttagtaattagaaccctaaccacttgattgctgaaaccggtgctctgggagttatccctgactcttttgtcattgttgagacagagtctgactctattgccctggctggagtgcggtggcatgatcatagctcattgctgcctcacctcctgggttcaaatgatcctctcacctcagcctcctgagtagctgagactacaggcgcatgccctgtgcccagctaattttttatttttttttagagatggggtctcactatgttgcccaggctggtcttgaactcctagactcaagcgatcctcctgccccaacctcacaaagtgctgggattataggcgtgagccactgtgcccaggcctgactctttactctgcccttgtgacctgtcatgtagtcaagaaagtttagtcagttgtaccttttaatgacctctgtaactcatctgcttatttgcgttgctaccactctgggccaagccaatatcatcccacttttcactatactttttcttatattttgaaatttgaatcattgacatgtttttacctgattggaaaaatactcgttaaagatttttaaaagtctagtaatccataggcattcaaaataggtaaccatctacttagcacttatacttaactttacagggaattgtacagatggatattcaaggaaaattaaaggcagtagtatcctgtcttttatcagttctgtttcaaaatttagggtgttaaaaattacttggtatgtaacagtgagcctgtcttgctctgggcaactgtattcattccagatctcaatgagggagtcaatattttgctaaatgttaactcagtctttttttttttttttaatggttggtataggtagagatggaagattttgatgcaaatatcgaagaacagaaagaagaaaagaaagatgcagaggaagaggaaagcgaactggtaggagacagaccaaccactttgaacagtgtctctttattaaaattcttaaagaaggtttaaattcagatctgtggttagacaactactgttgatatacactttagtggtaaaagtttccataatcatcttcaaggagacttttggatactctttatttttccccagaccaaaagaaccctctaatgtggtgttaagagaaagttttaacagagtgctaagaaacttacccttgtactcatctatttgtgggtggttttaggggagtataccttttaagaaaatcaattacatatgaaagggcattcttacattccagcagatatgtggcacagcctacccaacatatgcataattgtctcttctttgctacaagatctccaaatttgagtttctgtcaacagaggcagaagaacttattgaatggggaggcagagggttgccactggctgctagatttgttcttctgcattttatcctaagtgacggggaaaaattaaatgactgtgtaggcaatggattttgctcaggctgattagaggcttacatagtgtgagtttaaagtttctgtgtacctaatgtaaaatgctttcgatcacacctctgtagagatgtttgcctttccctgtcattcaagaatatgcgacctatagagttacgttgacttttcagtgtttactgaagtacagagattagcaatgccttggaatagtgttgctttttaaatccagaatattactcggtttatttaatacttgagcccttgctaaagttgctcctcatattcttttgaaaatgtacaaaatgagaactctgattcctaccccctagagtatacagaatctccagggagtggtcccatcgaacccgtgtgtgatatagaggactcttgataaaaactgtgtttatataaagatggtgtcaacctctacattccaagatttcaaatgtggattaaaaaataagttttaaagttaatggcatttgagtctcagtatgtgttttttttaaatctagttttcttaagttgtattttggcatatataatttaaaatgtaggcaggatattcactacaaggtccacgctcttctggaatatggctaatgacttctttagccatttgcagcgtgtgtactagaaactgattacgtgagaagtctataatgttttagctttctgaagctccgtctttcttttgtggagatttcagtggttcataacatctgacttgcttaggtgtaggtcaaaacttgggaacttttaattgaatgtactattactttttaaagtgaaacacactgtaatactatatttttacatcagagtcatggcaaggaggccttaaaattctaccctgctggattatctgttttatttccaagtggcctacaatttcaagcaatgggagagtaatatagtttaaaggaagcacaggatgattccagcagggggaaatgaatacacttgtctgcctgacttgattataaaacttctcttaacccattcaaagatgcagaattgaaatcttttactattggagtccattccaagagtaaaagattcttggagaatatgttaaccaagggttaagagcaagtttcataccaaccactcagatcatttaaatggaattctcagtaaaccttgcattttccactctgcactaattaatatagctggatgaaatccaaagttttgttggtaaagataatcgtttgtaggggatcattggtatgatagtttgcctcctttagtgcttcagtgaacctagtagataaaatttataaatatattattccagtgatgcttaaagttttcagatgatttttaagatgtaacttgtcttcagtacttttagcactatcacttcagtatagctttgtcttggtttgttctaaaaaatgtatttgggaaatatataatttgtaatccaaaatactacctagtaagttgaaattgaattattagttctggctggtagactagaaatgtatgaaacccataggattatgctctagtaaactcttacacagaagctatcatcatgaaatcttcaaaatgctttgtgacttactttacctgtgtgtcagtttgtttcatgaacttgaacattcccaacagtagagagatagattgattcataaaagaggatactgacacctttgatgaatctgtcctatttactaggttccaatattaacatttctgtatgttaggtctaatggaaaacagtctaaatgaaggtaaaggggaataatgataaatcacatggtaaaagcatatacttgctaggtgaataaacagaaatgattactgcatagttcaataggcacactgggaaatttgaaaatcttttgggagtgactttgaaataagccacccagttattttatgaaatataagatgtaagttgccagtggagatttctggtttttcatgtaagaggaaaacataattttaaaaaacatcagaaataataatctagttttcaactgataaaaatgttctgaatttgattcagtaaaattagccgttgtatgctctaactggtaaatgaattgagtcattttaaaatgaagttgaacttcctaatcgggtaattgggttaagtgccaccaattcttttcctttcttttgagtacttaagattactgaaatataaagtaactatcttgaagaacactttttgcatcttatagctactatcacttgagaatagcagttgtatttagaagataacctagctagtattacaaattctctgatactctgagtaatattaatattagcacagtaactacctgtacattcttatcatatttgctatacagctgttgttcagactacaattgtgagtcctgaactgtagctgcctcaaagcgccttcatgatactattctgaagtgactactctgaaatgtggacagtgaagtttggtgaatttggtcatttagtttcttcaaagataatgagattgtgtttcccctaaggatgtatttacagctagtcagtggaaactgaatccattcccagttttaatgcttttccagttcaaacgtgatatgcatgtatgtgtctctttctaacccttcgagcttctctctgtgtacgatttagggttacattccgaaaagcaaatgggagatggacacatctgaggcaaagctaggtgggtatttcctttttcctgtttttatatgtgatacctgatggtaatggtcatagatctttctgctataagaggaacaaatttcctaaaacttctacttgaacagagatttctggcctaccttatatcctccaatctattttgctagtttttatatcttgtaacaaagtgataagtattttaaaagaactgctttcaatactatttaaagtttttagagtcaacagaaatatttgataatttagcaacaaaatattgtcacttataaaatctattcttttatattaatcagaaatgttggtgctgatgagatttcttttttaaagaatatttaaatgcagtccaaagttaaacctgattatgaatactttagataataaaaataatataaagtttaaaattaattaaaaggcatttattctccttgtataataaatgagagtttctgagtagagaggagtagatatataattcaggtttttgaggagcctgctttataagattcagtttaaatttttcttcaaattgttaatgccaaattccaaggtaaaccagtttaaatgattgtctaaatcagaatttggagttgcttaatgtgaagttatctgtcaaacaaaaaagtcatacatatccaatggattccctctattatttgttggtgaaaactgcaaaatattttttcagttttacttcgcttaaagagaaccatttaacatgttgattaagatgtattaataaaaatctaaaacaatgtgctaaggactttttgagatcagccttactgatgtatgaagtatgactgtcagtttatgtttcttttcctggtattatactccaaaactaaaggaaccatctaagtatcttaaattgatacaggaagtttgagtcactgagctgcttcattgcttgggacatgtgtttctgacatcagaggagtgcattttacatgcaattacataagttgtgcctttaatttgccccaactacttgtgttagtagttggtattgactaggttctgtgttaaaagacagttccacggactttattattacattactggtataggtgctttgttgtcaagtctaaaagattttttttagtttatgtcatgtgaaaattatatgtggtttttgacatattcttctagtagtcttccctctgtgggaaatcttaataataaccaattgtcatcttccagagacccttaaagcacttatgtgtttaaatgcaattaaatatgtaggaaaataaaaattacaaaatacttttaaaataataataatgctttagttctgcttatttcgacgttagattaactctctgtgaagttctgtacattagaatgacccataatatgccaagatcatttctctcttctggttctcttaaatattgattatcctttagggcaaagagagatcataaataaagatagttaaggggaatgtaaaagtgataaatattaacttgtaatctctagaggcctcatgtaatacatgatctggggtaatgctgttttaaactcaagccagtccatcttttacttttctttctgtttttaaaaggaaaagggaatttagttgtgatgattattcaagaatatatattaatattggtatttcttggaatttctggaaaacattctggcccgtctaccatttgcttctcagaaaaaaacattttatacaaattttcagttttaaagacagaatagtagacaatgaattccagaaatggatttttaaaacaaaccatttcagtgaaaggcactgaagatctggtaataaatctaggaaataaattttaacatatttacagtcgggtttttattttttaacaagagtgatagtgatgttgtatataaggacttgtatcttgcaccactgtattgagagctaatcccaccacagaggaaggcaaatttagtgtgcattcttgaaagtgcttagtactttgaggttggtccattgagccaactgagaagattcttctctaaaacatgaggatcttgtgtcggatcttgtagcctatttatgttgccttccttatcataacaaatttaatataatttgattaccaagtacaatttatttttctgagtactttaccaacattctccaattactcttggaaaatgattatactgggtggaaatgtattaagttttagcagtgtcacatgttgagcaaaaacagttgaatctgaaacagaggaattttgattcacaaatgagtctgccagtgagaacatacttacctatagtctttgaagcagctggttagagcttattgcagattcttggtctatgctcattaagtttagtacacagttcagcctgtgcctgaatgttaaattggaagtgatgtgatttttagaacagttcagaacaggcctgagctacctctggcatggagttgttgaaggctgcctgtggcccaccttcagtcccaccagactggttcttccctgctgggacacaggcatcataatgcaagggcaggttgttacttgccacatcaggtggtgggattcagcattgaagctacttaaactccagtgacatgattttagtttctcatactgtgaagctagaatatttgagactgttaccatcctaatttaggtttcttcatataaagtacttttgcttttctcatctcagtgtcatttgtctctactcttgagttgtatattggttttctacatgtcagacagattcatctcttcagagttggaatataattattatttgtataggtgcataatcttgtatgtttacgttgaacagattttcagaaataccatttacatttagaaaatacatagatgtatctaaggaatttttctgttgtgctataatacatactgtttcaaatatgtggtaaaattctgtgacctgccatattggatttaaaacttcatcttcatcttaaaacttcatcttttgaaatctctgaaaatcattagtgtgcatgtattgaacaccagtctttattctgtaattaacaccccagatttctttcccctcaccttatgccatccatctgtgtgtttggtttccagtatgccatgtggaagaggtgtgagcctttcttcagcccaagaaggaaactttaaacatatttgcacaataaaatttcaaattaaacatttcaaaaagggtgctcagactagaaatacatgctcttctgaaattccatgttgcaactgtaactcctgtcatatatacccagtgtatgaggaaaagttcttgcagttttcacactgcccttctgtattgctgcctggctgtgctctgttgttggaactgaaatatgaaatttttactttgaagtatgttaatgtcaaagttgatcgtattaagtttggaaatcctttgaggtttatctaataagtgtgttggagcttctgtctcttctggtaatactgtaccctgttgaaccaagaacagttttattgtttgtgggacttcgttggttttctaataccataacctgtgtccctgtgcagtcagggggtcacttctttaagatcatgtataatacggcccgtcatatacacgtagatagagccatgtgattccagaaattagaagactggatctgtggaatccatacatgttaaaattttgccaaaatgagatgattaaaatttttgtgagttttataaactgttgcagttcgccttactgatttttcaatgataatcacttttatgggaagggggcttaggaacaaaaaactttgccaagaatgcaaaatcttactggtttttaaagcttgtaacagttgtgtgtaaaacttttatatttgaaacgtaaactcaccctttctgccactgctttcattgcacttttcataccaagttctctccaacgtggtgtctgaaagatttttattatatacactctttatggaattcaatgaagtgtggttatgctgtgtttctgaagtttttaggcttttcttcattggcctgcctaatactagtgtgtttctataacttcagatgattcaaaagtttagtgcttcattgtagcaaaaaatgtatataactcataatatcctacatgtagtattcaaaatcaattattaataaccaataaaagactcaacacattttcattgcgtgttcttctttaagacacctaaactcatatctcataatttctgaatccgcaatccctattcattaattgattacagtttttgagttgttggaaagcctagccctctcagattcagggttcagaaagaattaccaggtctggtaaaattgtctgactagcccttagcctcagaatggtcaacttcatagtataagcaaagaaagtggtgatctcatatagtcagctttttcatgaacattaattcatggtgaatgcactcacagcaaccaaaatccaaaaaaaaaaaatgttcatctaaaaccttaaacattagcttggctcattgagttcttggtacaacctgcttttcatatgacacagtatcaaacatgatttcagatgaaatgggtggtgttaatattgtgttaaagaaaaaaagaatggaagacactgtctagaaaagcccaactttgcatttgccatcagaaaatgagaactgtggtgggtgggaggacaaggaggccaggagccaagtgccttttcttgccttgcccatatttgctcttaaaccaacatcgtaaacataatggctaccagtgtgaataccaaacaatggaaattgcacagaacttgatattatctcagccaagaagatagtttggatctgcaagtgatgctgcactcaaaaatgtggatatgccctctgaaagcgttccagccttcttttcccctgtgtgtgtgtcgtgtgcaaactcacactcttccttaatgctacggctctgtgtttgtccctcagacaagttggatggcttgaggactggtactaaaaggaaacgtgactgggaggccattgccagcagaatggaggattatcttcagctccccgatgattatgatactcgtgcttctgagcctgggaagaagagggtaagagactttgtcaataactgccaacaaatgaagggcccatttaggcatctggttttaggaagttacaggcagatgatcacatggatgctatttttagaatgatttagtttacgctatgtcatgtatcccaagaaggagtcataccttataaattatctcatcaaaatgtacaagtagcttaaaaaattggagaacagaacctcacatggctagcacgttgtcaaccttaaaggcattgggagtggccagtcacttgtgctattttgtcatggggcaaaaaaagccaggtacagagtagggtattgaagagaacctgtggaacttcttaatggatgggatgtggagggtccaaaggtagatcaagggtgaccccttggtactctggccatgagcactgcatgtgtgtagtaccatttagtgagagagaaaactgggggagtcataggtcataatttttggaactgagagaaatgatttaagttctgtgagagaaattctaatttttcttctaattaagttagaaatataagtgaaaatgtcaaaatgactgttggatttattagtataaaactcaccagagagatcagactgaactaacaaatttcaggaaatggtatttaaaaccgtgggactgaatgatcttgcccaaggaaaaagtataaatggaaaaggtaataggacgccagacctccaaaatttagttcagatagaggtgtttcaagaaggaaagagtatagtcagtttttaaatgatgcagaaaagacaagtaagtttggaacagataaatggctgctagatgttggcaacatggaggtcactgatgattgtagtttgtcatcagtctacagtgatgaggcagcagaaaccagtttggagcagattaaagaatgaataagaaatgatgaagtacagtacagcatatataggcaactttttgaagttttgctgtgaaagggaatagagaaatgaagctaggatattagataggtctttacataaatgttgaattcgatagtgatagatgtgtatatcctttaaaacaaaataaagcaaagggatcgtattatatatactgttgtgtagaagtctttttcagctaatccatcttgatctttctatataagcatatacagaactaccattctttttaaagggctacttggtgtcccattgtttggttgtacaatcagttatttaactagtccctttgtgttagtccgtttgcgttgctataaaggaatacgtgagattgggtaattcatgaagataaaaggtttattttggctcactgtcctgcaggctgtacaagaagcatggtgctagcatcagctcctggtgaggcctcagaaagtcttcaattatggtggaagacaaggggggagccagcatgtgacgtggcgagagaggaaccaaggggagggggtcccaactccttttaacaaccagatctcacatgaactcagagtgtgaactcgctcattaccgtcaggagggcaccaagacattcacgaggatcctcctccatgacccaaacaccttcagtatcggggattacaattcaacatgagatttgaaggggacaaacatccaaaccataatgtctttactgatggatgcttacagtgtttccatttattgccagtacagatgtgaaggttgtggtgtgtatgtctctctttacacgcttacatgcaaataattgcctgtttttctacagcagtgctgtaatcaaactctttaacttttgacaatctgataggtgaaaaaaatagtatctcatttttcatttatttactaagaatgaggttgtgcatcatttatctttatgcatcatttctttgtatttctttcttaacgaattttctcagtgccttaatgtgcttagtgtacttagtaatgggcaccattacaaagaatccaggtttcaaagctttttaaaatactgcagatactccaaagcctgcccttgtctgtgtagcttcaaaggatgggtaagggagagcccactgccatttgcacccagcctcaccaaaggactgcttatagtgatacctcttactccagttttaaggctggagccaacagaggcagaagtggcccttccttgcaaataataaagtgtagttctggtaacaattagtaatctaaaatgagaaatattttctctgtttttactcaggtaactatcactgtcttcactgaggagtatgtaatcccatgcagtttattttattaggttgggtgaccaaagagaactgagtggtgcacattctagttctttaaagttgctcctctttaagtctcctcccctgccttataccttgacttcagatagtttttaactcttgaaccactcaccaaaaccaacattagagcacaggagatcctacaggtagcaaagaatacagaatgctgtacattactcattccttcttgggtttctttgtttctgtgattcagcttgttacagatatcagatgggttcttgggattaacttcctctataacaaaaacgtggttctgtagagttggttatattagaattttgcctaaatggctaggctttaaaatataatttacttttaaaatatttgcttgcttgggtataaaatggtagcttacttggactttaatttgtatttctttgatgactatggaaggtgaacctttcccttgtttgtttgctgaatttgtatattttagaaatacttatagttacagtggatgaaatataagtacctcaaacctttgagggctagttaagatttttctgtattataacaaatttatttttacaggaaaaaacaacagcaaaaatgtcgtaagtctcaaaagtacctctaggaaaattaaaagggacactgatattcaagaagccatttcaagctgaaagtcattattctgctccttgtatgtttagtggttcggtaatcatttattcattccatatgttgaatgtctttgtacgaagtctatgaatgagtcctcttaaggagctgacatccagtggaggaattcaacatgtaaataaataattttactatagcatcagtataaattagagatattaacaaaatacaatagtttccaaaatattttaattccaacttcatttgttttttgtttttttgttttttatttttgagacagagtctcactctgttgcccagcctggagtgcagtggtgattttggctcactgcaacctctgcctcccaggttcaagccattctcatgcctcagcctcctgagtagctgggattacaggcacccaccaccacgtccggctaattttgtttgtatttttagtagagacggggtttcgccatgttggccaggctggtctcaaactcctgacctcaggtgatctgtctgctgcagcctcccaaagtgctgggattacaggcgtgagccactgtgcctggcctaattccaatgttaaaatcttgaacatttattcgcaaacatactactcatttcaaaaacacctacacattttttcttctaatcctatattctttattttatctgagtttaaaacttagaatttaaactgtagatttaaaagtagcaaggtgagattgatcagtatatttaactatgtgctgaggttgataagtatatttaactatgtgctgaggatgccgtgggaatggatttaaatttgctgtgggctgtttactttttctttattcaatgagccttaccatataaggggcaaactgtggccactgaacaaagaaaaagtaaccagcccacagcaaatttaaatccattcccacggcatcctgagcacagtattgtgttttcacataaatgcccaagacttagttcgtaatgatctttcgctaaaatgtgtatccttgatccaggtggagctgagagaatatacatgaattaaatttaattaattaattattattgaggtagggtctctctgtcacccaggctggagtacagtggtgtgatcttggctcactgccacttctgcctcccaggctcaaacaattctcccacctcatcctccctagtagctaggatttcaggcacccaccacacaccatgcccagctaatttttgtatttttagtagagacacggtttcgccttgttgcccaggctggtcttgaacacctaggctgacgtgatctgccggcctcggcctcccaaagtgctggagttataggtgtaagccactgtgcctggctgtatatatgaattaatcaaaataggtacttcagcattgatgagcagaatgcccaaagatttttctatattgaagcccacattatttattaggcttcttactaaagcccatgaaagacattgagccataggttttctatacactaaaaacctactttctggaaagtcagatgttaccagtttcttcccactgctattactttggctcctccctttgaccaggtgatactgttaaaagcctagttatttcattgctagtcatgcaaatggtaattagtgtacattagagcaataatgcattcccaggttcagtgtaaagagcatggtgtttccatgctctggttctctctccttgtcacagataataaatcacaagccatgtttaaaatacattctctgcagtctttgatactgtgtagtgcaagcaacagattcatagtttctttttaagaatctgaacttttacagaatatgtatatctccatatacttttaaaaacatattaacataatatgtggctgggcatggtggctcatgcttgtaatcctagcactttgggcggccaaggcaggaggattgcttgagtccagcagtttgagaccagcctgggcaacatagtgagactctgactctaaaaaaaaaaaaaaaaattacaaaaatttttaaaaagcataatatgtaagaatatatatatattaaaaatcagaataccaataggaaatatccctgatccatatatttgtagttgtaatcttgccatgaattatatcagttgagtctgtttcttggtctctttatctcatgaatgaaagtaataataccagcttactgttttctctaagattaaatttcaagaaatatttttgtgtagagataaataaaattcagttattgatctagggtgttgatagtctgttagggaagacagatctgtaagtggataattatactacggtgtggaagttcaaaagcagacatatcaaaatccggaagttaactgtggaaagcagtgattatttgattggcaaaggaaaaaggggtaagtcagggaaggatgactagactcatgccaagtggataaggttagggaaaagacatttcaggaagaatgactagtacatatatgcagagttatagagacatgaaatggtgcgatgcgctctgagtgctagaaggaagtctgtattgtttgtataaaatgccataggcactggccagagatgttgcaggaaagtgtagttggggccagatcaagagggacctgagttcttggactttgcctggtaggtaggggaaggagttaaagcaaatgaatcacaactgtgtgttttaggaagatcactctggcagcatgaatctggagcgggtgagtacagacaggaagactaggtagagattagtgctttgctttcaggtgaaaaaaaaatgaggtcagtgaattattaaataaaaaggaatggcagaggagaaagagaggacaggattgagctgaactgttcaggagctggaatggttaggacttggattgtccagagagttttctctttgtgacttaaaatatatggcttttcccagttttcctgggttagtttttaattttttaaacttgcggtttcaaatgagtcattctaccccttagactgtccagagagggagggggctctttgcatatttatttttcctaaagctcagcctaatgctatgttctttttaggtcagatgggcagacctggaagagaagaaggatgcagataggaaaagggccataggttttgtggtcggacagactgattgggagaagatcacagatgaaagtggtcacctggctgaaaaagccctcaatcgaaccaaatatatatgagacttagtttttgaacggagtcattattcctctaaggtaagagtacacagtcatataaatagcctactgtgtggttgcttcaaagggtttgagataaagaagacagcatattttgctaaaaatgctctcttcttgtgttattttatagttctgaaagagtaagtatgtactagttgttaacatttacaatactattagaaaaggaagccattttctgcaagctggctcacttataaaaataaaaaccttgagaaaaacttgaattctatagatttgggaaggactgaaatgatgttatactaagggctactgaactttttgcctgttctttccaggtgtgacagccttttcttttctttccaggtggttcgctttgaggtggtctgaagccaaggcctcgcggagcttctttgtgtgtcaccttgcttccacgtttcagttcttgttttgtttctactgctttagttttttttaaagttctccagtgtccccaagaggtattagaatcttgctgtacccaagcaagacgttaatttttcttttaactgttttggggagggagggagtgatagcttaactgctgaagccaggcgggggtctgctggaggattccaacagagagtatttcctccactgtacaatgtcacagactatctctatcatcattgctttgtggctgtttctgttttttactgtatgtaactggtagctgattgtactaggattaaaaacaataaactttcatgataaagccgatgagattcatgggctatacagcatgggcccttttctcttgttttcttaattttatttttaattgctttttaaatatggtatgtcctaattaaatgctagctgaacatcccaaaacctttttttcattgaatattatatggctcaatgattccgtagcacatgttgtaaaacacagggttcaaatgatgttcaaaacactcatctttgttttatagctgatttctctatctttgtgtcttgaagactgaccaagttcaaatattcatcagttccctggagcatatccattctgtaacatgatgctttatttaaaaattttttttgatcctctctctgttcttccctctcttctttccttccttcttcttttcactttctgcctttatgctgttaggtttttattttttcctgatctggctttgaattctggtagacagaactgatgtattctgtggaactcaagcttgttgccttcatttgaacttgaattgtggatttttaaatgaagattgcagggaaagagtataaagatgcagagcactctggcatgtaacctttaagcctgtcaggttttcaagttcttgccagattgttcattactggaaagcatggccttctgcacagaatttcctctcttgtggttaataccaggtggaacccagaaacatacagagataaaacccaaatattatttctatgtaaacacagaaaagggactcttccctttttcatcctgcaaagaaaaaagtcatcttttagcatgaaagaagatgagagagccttcttcctcaagcataatttgcattttgtaatccaactcagtaatttgtaaatgtgttcactgaagacttcaatattttgaaatattctctttcaggccacagatgaaaatcctttacttttatgacctacattaaagactgtatgaatagagctaatagttactagcatttgaatagtatcactttgggttcaacaaattgatattatagtactgaatacccctaatttaatggaaattctaacaactttctgtacttttatcttccctgaaaatctgaatttttaagcaagtgactttaagttcattaagtcaatattgaatgtataaattgctacattaaataacttctgctgtttgtagtatttaataagctattttcattgcttattggcctacaatacatttctgtgtactgacctttctcagcagcctttattatgtagagtgaagatatgtcgcaaaaatagccaaatagaattattgtttgtacaaagactcatttactactttctaaagccacccaatgcctattatcaaaaacaaaacttccataatgtgttctctagttcagatgaaatggaggccgatatgttcttctgcaggatgctttatttcagttgtccttaaccttgtgatgttctgacagtagttagaatgccaatgaaatgagtggtgattatccgtgagtcacttggaatcatgggtaattttgcatatgtgtgttttcaccttacagccatggctttatgtctgtgctcttataccagggcagggtgggaagctggggaagagttaacatagtcagaaacggcctctgccaattttcagaagatatagattacgtgaccttagagaatgaacatagagtgctcctactttagaaaatgggtataacaaccttcatgcaaggagattaatgaaaaaagatttggcaccaaaaagagtaatagagacagccagctgataattgattttgctagtccaatgtgggacttaacaaaattcttgcacttacattactattagaagcagtatcgtataggaagcccaaggtatcttgaagaagaaatttggtgtgggtagaaaatgccttgataatacaaatattttaagtttgttaagaggtgtcctggaaatgcagaggactaattttggattccattatttgctagcattttattttaattttattaacattgtcttctcttagaaagttgctggtttaaatcatatgagttttattttaaatcttttgtggtgtcatgttacttaaaataatcttatgttgggaaaggtttctgataccttggtgggtatttcagctttttttttttttttgtcagctctgtaaaggatgatttcagacattttaaactgaaagtgaaatctctcacttaagtgatctaactttacttgtaaacttcctgtgtgaggaattcagtagacgagacccagaaatgtttctgtttgagaatatttagagttaagtgccgtatttgaaatattcagggactgattgtagaatcagaagtcattaataataatacacaagtagtctattgacagttgattcatataattttctagaagtttgagtttgattcagatatcagtgttaaatccagaagtttattgacaaagataaaatcttaaattttctggttggatttgttttcctcgtgaaagagttttgatcattgagcaaaccaaagtaggtgccatgtcatctagagatcgactattacattttttattagattgactaagaatctcaactgaggttttcttattttgtaggcccctcagtttttgtgttaagtattttatcctgctaactgtgcaaattgcagatattttggtaaagatgtctagagcctggcttaattactaggattataaaagcaacagattctcagctgagataagttttgctaagccatagaaggagaatgatttctcatttttagtattcacagaccctaatacaagttcagattcttctagaagctgtatgaccttaagcaacttttttttttttttttttttttttggagacaaggtctcactctgttggctggagtgcagtgacgcgatatagctcactgcagcctcaacttcctgggctcaggtgattctcccatctcagcctcccaggtagctgggactacaagtgtgcaccaccacacccagcctttttttttttttttttttttaagagattggttgttgccatgtttcacaggctggtcttgaactcctgggagcaaatgatcgcctatctcagcctcccaaagtgctgggattataggcgtgagccaccgtgcctggctgaaatattttaacctatctgagcttcagtttcctgcctataaaatgaaaataacaaaacacacctattaaacattgagataatgcatgtaagctacttggcacagtactgagcacatagtaaaagctcaaaaatcagtagtcaccatcatcgttactttttgacttgttctcatgtgttctttttgaaattcaaaatatccagctggcttgaagatagttgtcacgttttatagtcagctatcatagactgagctatgtcatatgtaatagtacagtgtgttgaaagagtaattattcagaagcattttcaggtaaccagtgacattgattttcagaactagtacggaggcttgagaggctcaggtgtaaaaggtaatttagtacttagagggggttgagtagtaacagaaagtagttgtcagaccacaggtataaacataggtgagggcacagaatcattgatttgccttgattttcacatattcaagaagaaagtaactttgtgaataaataatgcgttcataaaggtataaaactcaggaggttcaagtgtcccatccatcttaaccctcagcctcccacgactccatctgtagaggcaaccagtgttgagaaaaattgtgtggataagcattaagtattaatgtttttacctggtttttgtacacacactaccttatttttcctttaccagtatgttttagaggtcattcagatcatatataaaatattcacattttctctcccccccacctccttctttggttttccaaaggtaccttcataatataaagaggtttactgaaaaatttcagaaattgtttcagctgcatctctgttcttttcgtggcatggaatacatggtatgggtatatttgtatacaattctttcatatatgtaggttggtgtaaccaccctccacctttctcctagtcccccaaccccaccatctctaacccttggcagccactaatctggtctccatttttataatcttgtcatttaaagaatgttataaatatgaagtcatacagtatgtaaccttttgggattggcattttggcttttttcactcagcgtaattttcttgagattcatttaagttgttatgtgtgtcaatagcttattcctttttattgctgagtagctttccaactcattctcttttgcagctgcagaatgttttatgtctttactatcattttaacttacagagtctctattaatgggtattcatgctctcgtttactgttataaattatgaatttcacatatactcagtcattctgcagcttcctgtacttgcctgatttctagcaatgaaggaaaataccgatggcaccatttcatagacatactcaaaggatgacaagcacttaaggaccagcacagcacagcggtgaactctcaagacagtatgacagtaatgagatgacgaaggcacatcttgtttcctggaaaattctgcatgataggagactgacaaagcaaagaaccatgatgtgtcttagagaaccagaatggtcagagactctgatgatcccctggtccacacgtgactgagagttaataccttaggtcactgttctcagaacctggatatttatatgcacgtgcacctcagtgactgatccattctcagttttcaggtccattgctttcacatttgaaatagtcaaggagcatctttatgactggggctgagcttctgcattcatgtacagccctctgcctgccagcagtgccttgcatttgtgatcctacaaagagcctgtggacttaatggtttactgtatagggaaaggcttgactttgtgtcttctacttaagaagcttgaactttttaccaaatattcgtactccttttcctgaaaatactgatctaggctacagatccatctcttaaccatatttgaaaaattgaaataatatcttctgccataacttgaaattccactctcagatctgttatttctgacagtgagtttgtatttctcaagtagatatgtctgatgcttatttcttttacagcatctggctcagtgcatggctcatatatctgtagagtgagtaaatacagggaatgtttcctatgtgtatggcaagggtcacagactcaggcaggtaacagatgagcaaggcagagggtggagactggtaaactagacaactagataggtcaggtcaatcgggggcagcacctgctcagccatagcagattgtggccatgtggggatataggtctcatattgccagatttcctgggttttcaagaaaaagtgaaaaatctggatttttatgtgagatcttccagtatttcagcatcaggttctttttgtttgtgagtgctttggccctcacagcctgcctgccacatctgacttgtggactgccggcttgaaacctttgatatttagagaagtggttagaccttagagttggttctggtgagatccttcttgttttacagatgaggtttctgagaccgaaagaagggaagtgacttgctcaaagtctcactgttactcagtggcaaaacaagactagaatttgggtttcctggtccataacctgtcactttcttttttcttaactacaatacctcctttatgaagaccttcataaattctaggatggtgaattctcctttattttgtgtgtcgtgtgcaagtggacatgtgtgtatttactaaactctgtggacctggaaatacattctgatatgactatcaggaacaatgtgattacttctgaaaccaacttccttaaactctcatgtataaggtagctatacacctaggatccctcttaaacacttactacttggttgggtaattctcatgaataacagaagcttgaaaattaacagagtattggattcagtgattgtacaagagcagtggagttttctccacaaagtagagaaaatcatttgtgtattgttatgcaaatagcttacagaactattaataattttgttttctttaatttgtaatttcttatgtaactagtccatttgctttcacccagtgatgagcatcttacctgcttcactcggtagcgctccattcctaatctttttaaggacaaattcatcaacttggcgttaaagtctatcagtaacatgatcccagctacttctccagattcctcttgagctgtccttactacatgtgcactacactgcagccacactgtgtgacttattccctggggtttctattgtttctgccttgcttttctcatcctttagatattagcattattggctgggcacagtggttcacacttgtaatcctagcactttgggaagctgaggcaggcagatcacttgagcccaggaattagagaccagcctgggcaacaaaaatgtcggctgcagtgagctgatactgctgtccaccctgggcaacagggtgtgagacctcatctcaaaaaaaaaaaaaaaaaaaaaaagccaggcacggtggctcatgcctgtaatcccagcattttgagaggccgaggcaggtggatcatgcaaggtcaggagtttgagaccagcctggacaacatggtgaaaccccatctctactaaaaatataaaaattttcagctactcgggaggctgagccaggagaatcacttgaacccaggaggcagtgacccaagattacaccactgcactccaacctgggtgacagagcaagactccatctcaaaaaaaagatcggtggtgggagaaactgtccaaaggcccagctcacatggtactgcgtccctgaatctgttcctcatcttgttccctcccagctctcacaggctttgtttgtacatgtcctaccatcttctcttaatttgcctttctagtagagtaacttatatatccttcccccccatccttacccacttacatacaagctcctagaaggtgagaattatgttttactcatcttccatccttgtaacacataatatgcagtatctgttacatatagttgctactcaagaagtatatttagaattgatgacctggtgatttttaagtataaaattaattcatgtaggttcatatatgtataatttataaaaccaattcttgtgtttgctttttccctacctctgtatcttccagctggtggcatatcaatacttaaggcgtagcacattcaaatgccttcaaaggacaggaagataagtgtaaatgagagaattggccagtaatttcataatatatttagttttattctttcaacagaaacttactttgtttgcagattagacatgtgggaatattcttcactcttatagaaaaataccctgtttctcattctcaaaacttttggcactctcttagttttcccacctttggtagagacataagtacagtattattttttctttactgtgagaaaaacaacagcagaagcagaataaaacagggtacttggccctctcagcctcagggttcaggaagcagtagggtatggtggaggctgggatggtgcagagtgcttgtcctgtctcaggggacaattctccagccagtggttggaatgaagaaagacagacccaatgttactagatgaagataaagtggaagtctgcatttttatgtgaaatagtcacagtagaaacaaatcacatctggaagccacatgttaccaataggctgtcattttgggacttttctgacatgctctaaaggatgatgacaagtctgaaagacagttatggcaaagaagatatttgtaagaaaggaaacatcaggttttattacatataaatattttgagcagcacctttttactagtattttggaaaagcatttctgtcttcattgagcgaagtggcaatacatatgtaatatactgatgctgaatttgcggtgggttgatttttgtccattgttggctttcacatggaagcatgaatattgtctccccgctaccccttttgagtgacatccttccagtacctccatttctcaagttgcaggtaagcaccttgtgtatatacagttaaatagtgggcacacatctatcccaggaaaagaagacagtgagaattccctttggttaagtggagcagttgaatggccactatacctggatgcaaatttgatccgaattttctgctctaaaccctccactgctttctgctgtttccactgaggaaagaggatgtgtgtcattaaagctttgttgggacctgtcacagtcaaggtgggtataattatgtttaatttattgaagtgtttctgggcatcgtctttttcaaattcatatattctatccagaagatgtgaattcattttcattattaaaaaaataaaatattacagataaagctcaacactcccccctcccccttaagcacaaataccttgaatcttagaggtaattactattattttggagtgtggcttttccaaacctttttgtgtgtatttgtatacatatgtacttgcctataaaaatacagttttactgttttttacatgactgatattctttacatactgttctgcagacctactatgtcttggatacacacatgcatgtatatatgtatatataggtaaatatatatataggtagatataaatacatgcattcatgtttgtgtatattccatgatatgtgtataatggcttactttttcctttttttgtgagtttttcactgtcataccagtgttgcattgaacatccttgtaaatgccttttgcaggcttattttcaaaaatcttccctggggaagatacagaagaattgaattactgggctacagggaaaccatttctctttttattttctcctaataattatctacatgtgtgttttagaaacagtcttaatttaatattgggggtttcaaaattttttttctcattttaaaattccagttttatatgctgtactcatttgaattctgccttttgaatctagatttggaattgatatggataagcaaaataggttctaagtggtagtgatagttcataaccagtttgcttttggaataggtgctgtttcaatcttggggaaggtaaaatgtcaattgaggaaataatctttaatcatgaagttcttttttccaagtcattctctgctccctttggaattatgacaacttggatccagaggtgctgtgaaaatattttcttacatcatacctcttcttttcatacaagtttgaatgatcccggaaaatacagtttttgtattttcaaaaaaaaaaatgaagtctggaacacccacttttcttaataggatctagtttatttgtttaggtagtaaagcttttattaaaagaacatactttgaggattttctgtttctcacctgagccttctgtattcactagatatgaaactgagtgcattggcagggcctctactagacctgaaaggcagcattcccagtgtttattttcaggggccagagggaaggctattgactgacattggaggccttaacccctggattggtaaggttctggtggaatgattgcttagattccataaacactcgaatagatgattactcctttctgtatgtatgcatttttggaagaatgataaaatatgaaaagtgtgaagagttgtgcactcaagtggtggttttgacctggggagcttttaaaactcccaaagctcaggctacacctcatagcaattaaatcagaatctaggagtgggacccaggccttggtaattttttaaaaggccaccaggtcattctaatatgcagccaactttgagaactggtggggtaaaggggattttaaattttatttcatctctagctgatgataggttcattaagcaaaactttcgaaggccctggtctgttggttaactttgcaggtgtggaagatacagttgttggaaggatacttgttaatgaaactctttaaatgtgcaaaagaaaatccacctaggctgaaagagttaatgcggtttccaaaggtgcttgatagccaagaaacagcttaggcacagggacagtctggcttcttgggagcaaataaagccaagatttaaaatgccttttaatctaaaacatatgtttgcccgtgggcctggaaacaagcctaggcctttgcagttgtgaagtttcctcacgatagacagacatgagttgtggtccaatgttatttaaacttgaaagcttagaggagaaatttggtttgtggaggaggttgtagatgggagaagagaagtgcagtgggcaggcagaacaaattatttttctgtggtttgtcctttctgattttaagaggagaactagttcatagttccagttatcacatacaaaatggaacaaacctcaagaaaatgagaattgctattttcaataagctagaatgatctctttaaattaatctgctttgatacctaagataatctctatttgtggcataagcgtccttataaatgcattctatggtggtatggactgttttgcgtcttctttagagtacgtgactccttcattagaacttttccccaaagattctgatttctcattgttttttaaatttttattttgaaatagttacagattcataggaagttgtagaaaaaaatgtacagagaagtcctggtgtattcttcaaccagccatccccaatggtaacatcttatacaatgagaagtgtgtgtcaaaacttttaaaagccaagaagttaatgttgatacactccacagagcttattcagattttaccagttttacaagcactcatgtgtatgtgtgtgtttggttctgtgcagttttatctaatgtaacttcatgtatttgtgtgtgtttggttctgtgcaattttatctcatgtagcttcatgtaatcaccaccaccataatcaagattcagaactccatgtgggaatgtgaagaactgttaagagaatgagtatagaatgagtcactttgcttgtagtcccatcatgacttaaattcaggactttatattgttggggactgctgctttgagggggtaagtagcatagcttttgcaacataaagtggctttttagttttttttttttcatgagatcatcaatattggtgcttttctcagtaactacgcttttgagtagttcaagcatggccacttgctttatttgaagggagtaaaatgagaagtatatgccccagagcataagaatctgttgctgatcttaatttttggacaaattgaatgctaggaagttctttttctgccaaacttcagaacatttgagacctgctcagtaaacagtcattgtatatttttagtcctaaaacagtaagaagactattggcctcccagagaaatgccctgatgtatttgaattgaataggcatggctttataataaagaaatagtaacagtcactttaaatagcatattctaagcattaagtcaacctgtcaaaccctgcctcactcacattttttaggtgattactgtctccagagcataaggatacataatcatgtctactgttcacatggcataaggataaatcctcatggataggataatttaaaaattatttttgcaatagtatgtcaaaattaaggtgtttaggaaagtccattgttattaaactttctgttcccaggacttgctgataaattacaatcaacaaaacagtttgtattctgttcttgtacccacatccccctgtctaccttagaaattcttttttggggcaccatttttggcaagaattctataggaaataagagtttctggagtttgttctgattggttcagagtcagcaagctcagctctgatgaagtaatgggatgtgtgaaaagaagtgtctaaacaccaagataggaatattgagcaaaagcagctttggggtgtatatcaaaaatgcattctgtctgatgtaatggtgtttttttgttagaaatttaatacagtaagaagtcagcaaaacttcatgttgacaatcccattgtctcataaagcttgatttgaaaaagacaatgtagaaacagactatccagaagacatttagagccttaaatattctgataatcaccaacccacactcatggaagagcagaggagaagataatcaacattagtgactataaatgaaaagaaccagaaaggctggattactttccatcaaaaaaagtaggttgggtgtggtgcctcatgcctgtaatcccagtgctaggaggctgaggtgggcggatctcttgagcccaggagttccacaccaaactgggcaacatggtgagaccccatctctacaaaaaatagccaggcatggtggtgcatgcctgtagtctcagctacttgggaggttgaggtgggaggatcccttgagcttaggaggtggcggtttcagtgacccaagattttgccactgcactccagcctgggtgacagagcaagaccctgtatgcaaaaaaaaaaaaaaaaaaaaaaaactaatctttatgaaaaaataatcctgaatatagatttaactgttaagaggggggaaaaccaggattccagttatgtttccctcgccacccctgacccagtcaagaaggcaatgaaccagccagccccttttaacaagtggaacaactacagagatgttttgaataactgtacagaagttaagaaaatattcaagccaaaactagtctactcaatgaacatagatacagccccaaaaagcagtggttagagatggcaagttgcataattttagaaataccacattagtcactgagcttttaattaagaggatgtcaaaaatgcagtgtaggccaggtgcagtggctcactcttgtaatcccagcactttgggaggcagaggtgggtggatcacaaggtcaggagctcaacaccagcctgaccaatatggtgaaacccgtctctactaaaaatacaaaaattagccaggtgtggtggcatgcgcctatagtcccagctactcaggagactgaggcaggaggatcacttgaacctgggaggcagagcttgcagtgagccacgattgcaccactgcactccagcctgggccacagagcaagactctgtctcaaaaataaataaataaaaaaaaaataaaaaaaatgcagtgtatccccctgtgtaaggaaaaagcaggtcagcgtctgagcaaccaaccaagaaacagcaatagtcgtaatgccatttgtcaaacatgtcaacatggggttgtatttaaaaagtaaatgacgaaatgcatgtaaactttataacacaaaggtttttagctgggttttcttcccaaactatattaacatagtttaaagctaagttttatggttgtgtccgtgttacatgtcagtgatgttgttaagctaagaattctttttcactgtgaagcagtacaaattcatgactttgctaacaatctatgactgctgagcagtaatacagctaacaattactgagcacatactatgctctagaagtgtgttgagcatttcacatgtatggttttacctgaaccttagaacaatattatgaggtaggtgctatattattatctctgttttacagatggccaagctgaggccaagaagagtaagtaatttagagagatccgtagctgataggtggttgagcccggatgaaaacacaccccaaagcccatgcacctaacaaactactcgatttgggaaaggtattaggtgaggtggaaagcaaatagggtgggtgaagcattgttaggtcagatacctgaggataaagtggggaaagggtaaagggaggaacaacattcttgccgacagctgaagctccagtccagaagcagtaactgagggcatggaagtcagagccacagaaatcagtaaataggggaaagagaaaggttttcctaagggaagaaaaggaattgacatttgtttgaggtgtgactggagaattggaaatggcaaaacaagagtttctgagcatgaaggggtgagatcgtgagaaatgaaatcaccctgaagaactcttggtgaaagaaaagcagacccctagtgagcagatggacatgtaaaactggcgacggtttgggttgttcctttactgtgttcattgttcacctgccttcaacatttcatcagacactcccttcctctggaggctagcatctgttttgctttttttttttttttttttttttaaataggactgagcattcaactcttaggcacttggttatatatagtacttaggttattgaaaagagggccgagtgtggtggctcattcctgtaatcccggcacttttggaggccaaggcaggcggatcacctgaggtcaggagttcaagaccagcctggccgacatggcgagaccccgtctctactaaaaatacaaatattagctgggcatggtggtgtgcacctataatcccagctacttgggagactgaggcacaagaatcacttgaacccagaaggtagaggctgcagtgagccaagatcgcatcactgcactccagcctgggtgacagagcgagactccatctcaaaaaaaaaaagctt

SEQ ID NO: 116 - DNA, 3244 bp, Homo sapiens
gcggccgccgccatgtcggtgctgggcgagtacgagcgacactgcgattccatcaactcggactttgggagcgagtccgggggttgcggggactcgagtccggggcctagcgccagtcaggggccgcgagccggcggcggcgcggcggagcaggaggaactgcactacatccccatccgcgtcctgggccgcggcgccttcggggaagccacgctgtaccgccgcaccgaggatgactcactggttgtgtggaaggaagtcgatttgacccggctgtctgagaaggaacgtcgtgatgccttgaatgagatagttattctggcactgctgcagcacgacaacattattgcctactacaatcacttcatggacaataccacgctgctgattgagctggaatattgtaatggagggaacctgtatgacaaaatccttcgtcagaaggacaagttgtttgaggaagagatggtggtgtggtacctatttcagattgtttcagcagtgagctgcatccataaagctggaatccttcatagagatataaagacattaaatatttttctgaccaaggcaaacctgataaaacttggagattatggcctagcaaagaaacttaattctgagtattccatggctgagacgcttgtgggaaccccatattacatgtctccagagctctgtcaaggagtaaagtacaatttcaagtctgatatctgggcagttggctgcgtcatttttgaactgcttaccttaaagaggacgtttgatgctacaaacccacttaacctgtgtgtgaagatcgtgcaaggaattcgggccatggaagttgactctagccagtactctttggaattgatccaaatggttcattcgtgccttgaccaggatcctgagcagagacctactgcagatgaacttctagatcgccctcttctcaggaaacgcaggagagagatggaggaaaaagtcactctgcttaatgcacctacaaagagaccaaggtcaagcactgtgactgaagcacccattgctgtagtaacatcacgaaccagtgaagtctatatttggggtggtggaaaatccaccccccagaaactggatgttatcaagagtggctgtagtgcccggcaggtctgtgcagggaatacccactttgctgtggtcacagtggagaaggaactgtacacttgggtgaacatgcaaggaggcactaaactccatggtcagctgggccatggagacaaagcctcctatcgacagccaaagcatgtggaaaagttgcaaggcaaagctatccatcaggtgtcatgtggtgatgatttcactgtctgtgtgactgatgagggtcagctctatgccttcggatcagattattatggctgcatgggggtggacaaagttgctggccctgaagtgctagaacccatgcagctgaacttcttcctcagcaatccagtggagcaggtctcctgtggagataatcatgtggtggttctgacacgaaacaaggaagtctattcttggggctgtggcgaatatggacgactgggtttggattcagaagaggattattatacaccacaaaaggtggatgttcccaaggccttgattattgttgcagttcaatgtggctgtgatgggacatttctgttgacccagtcaggcaaagtgctggcctgtggactcaatgaattcaataagctgggtctgaatcagtgcatgtcgggaattatcaaccatgaagcataccatgaagttccctacacaacgtcctttaccttggccaaacagttgtccttttataagatccgtaccattgccccaggcaagactcacacagctgctattgatgagcgaggccggctgctgacctttggctgcaacaagtgtgggcagctgggcgttgggaactacaagaagcgtctgggaatcaacctgttggggggaccccttggtgggaagcaagtgatcagggtctcctgcggtgatgagtttaccattgctgccactgatgataatcacatttttgcctggggcaatggtggtaatggccgcctggcaatgacccccacagagagaccacatggctctgatatctgtacctcatggcctcggcctatttttggatctctgcatcatgtcccggacctgtcttgccgtggatggcataccattctcatcgttgagaaagtattgaattctaagaccatccgttccaatagcagtggcttatccattggaactgtgtttcagagctctagcccgggaggaggcggcgggggcggcggtggtgaagaagaggacagtcagcaggaatctgaaactcctgacccaagtggaggcttccgaggaacaatggaagcagaccgaggaatggaaggtttaatcagtcccacagaggccatggggaacagtaatggggccagcagctcctgtcctggctggcttcgaaaggagctggaaaatgcagaatttatccccatgcctgacagcccatctcctctcagtgcagcgttttcagaatctgagaaagataccctgccctatgaagagctgcaaggactcaaagtggcctctgaagctcctttggaacacaaaccccaagtagaagcctcgtcacctcggctgaatcctgcagtaacctgtgctgggaagggaacaccactgactcctcctgcgtgtgcgtgcagctctctgcaggtggaggttgagagattgcagggtctggtgttaaagtgtctggctgaacaacagaagctacagcaagaaaacctccagatttttacccaactgcagaagttgaacaagaaattagaaggagggcagcaggtggggatgcattccaaaggaactcagacagcaaaggaagagatggaaatggatccaaagcctgacttagattcagattccgggtgcctcctgggaacagactcctgtagacccagcctctagtctcctgagcctatagagcccccaggagactgggacccaaagaacttcacagcacacttaccgaatgcagagagcagctttcctggctttgttcacttgcagaaaaggagcgcaaggcagaggctctgaagcactttccttgtacatttggagagtggcattgccttttagataggatctaggagtgattttattgttttggagaatggaagggcccccatggccctggctttgtcatcagtgactgccatagcaacagcagctctgtacctcatctgttgatcccaccttt

SEQ ID NO: 117 - DNA, 3128 bp, Homo sapiens
tatttccatgcaagtggaagacggtaccgtctccccacatttgagaagactgttttgcatcactctttgctattgaaggaagcagtgatggtgaatttccttctgtttgggttccttgtgtctataacttcctttgtggtaaagccatcaggaagaatagtgggagtggggtatatggtcagggtgctcatatcctgctttagcctagctgcttcttacggagtgcaagggagaactctgagaagcagtatgtaaataccagggagctgattgctgaatattgtggtctcatctgaatattgtggtctcatctaaatattgacaccaggcaatgaagcagaaatagagtatgtgtccctttatgcgtgggtaacttaagcttctgtcatgtgggaagggggaccgaatcttccctgggaggaaggctccaaattctcactacttctgtgttacttgaagggggaagcataaggaacccagtttgaaggcaacattgtgtgccatgaatctgcttattaatcaacatgccttgttaatgtcctctgccctgaacagcccttactcagttctcatttggaaagttattttttggggttacatcctgtttgtttcagaatttaaaaccctccatggtgggtcacttgaggtcaggagttcaagattagcctggccaacttagtgaaactccggctctgctgaagatgcaaaaattagccaggtgtggcacacgcctgtaatcccagttacttgggaggccgaggcaggagaatcgcttgaacctgggaggcagaggtcgtagcgagccaagatcacaccattgcactccagcctgggcaacagagtgagactctgtcaaaatcaaaaaaaccaaaatacaaaaaactccattgttctgagagtttcccctaaattatcggaagacactcacattgaattggtaggacctatagtatagaggagaatggtatgtatgtcagcagtagagttccaatccaaattgcgctatcgcattagaaatacattaccctcccactccccaagttcagcaaattagaagagaatctgaagtttgtaggaagggaataaagctgctataaacatttatgtgcaggtttttgtgtagactcgttttcagctcctttgggtaaataccaaggaaccaggttgctggattgtaagttaagagtatgtttagttttggaagaaactgccaaactgttccaacatgactattttgaattcccatcgacaatgaataagagttcctgtagctcctcaccctcattagtatttggtgatgtcactcttgcattttagctaatgggtgaatagtggtctcatcgttttaattcccaatcccatagtgatgtggagcaccttttcatatacttaatctgccatccttatatcatcattggtgaggtgtctggattttctgtccagaattttagttctagtggttttcttatttttagaaaggaagtataggaaggaaggtttaatctgtcttaagcctgattatatgaaaatcaagaataggctaggtgtggtggctgacatctgtaatccccgcactttgtgaggctgaagtgggaggactgcttgagcctgggaagtcaagcctgcagtgagccatgactgttgctgcactccagcctgagtgacagagtgagaccctgtctcagaaaaaaaaaaagcaggctcattttaaagttgtttatattttattttttgaaggaaataaagttgaagagatacaaagggtagtgaagattctccttcccctcctgtaattcagctgtttagtttctattctcgcacagccctgttatcagtttctagtgtaagcttgcagtgacttttactttatttataagcaagtgttagtgggtgttgtcatttcttttaaaaatataaattatactgtacatgctattttgtattttggcttttctcccacctaaacaccctaaagatcattttctgtcagtatataaaatcttggtgatgccaatacccatcccttagattgtacaagcagcattttgccatgctttatcccatagcctgcctcctgcagtctcatctttttttctatatgcgtgtccaagtaagttgtagacatttttcacttttaatcctttcagcatacatgtcatgggaatttgtttttgtttttgttttttgtgtttgagacagtcgctctgtcacccaggctggagttacagtgacgtgatcccagctcattacggcctccacctcccagtttcaagcaattctcatgcctcggattcccgagtagctgggattacagatgtgcaccaccacgcctgactaatttttgtatttttagtagagatggggtttcatcatgttggccaggctggtctggaactcctggcctccagtcatttgcctgcctcggcctcccaaagtgctgggattacaggcatcagccaccacacccagccgtcattggagtttttttgagggagatttgcagtaaggtgaataaatgttaagtgtatcatttgatgaggttttttctttttttttttttttttgagatggagtcttgtatcgcccaggctagagtgcagtggcctggtcttggctcactgcaacctccacctcctgggttcaagggagtctcctgcctcagcctcccgagtagctgggattacaggtgtgagccaccatacccagactcatttgatgagttttgatgtaaaagcatgtaactcaaacccctatgtctggaacatctgtattacatctgaattttttcacctagtcaattcctgcacctctctctcctgtcccttcttccctcccctggcagtcagctactgttaggattttgttcactgtagattaattttgcctattctagaacttcatataacggactcacttatgcagtatgtattctgtaagttccttttactcagcatgtttgtatgttcatcagtgtgtttaagctttgttcctttttatggctgagcagtgttctatgtatgaatgccacattttaacgtttcacctgttaggtgaacaactaactggtgaacaatgggctgtttctagtttggggctatcatgaataaagttggtatgaacatgtatgt

SEQ ID NO: 118 - DNA, 2326 bp, Homo sapiens
ccagatcgcagctgaaggatctgttgagcgcttcaggaaaggcggacaggcgacactaacaggtgaagatctcgggagaccatgactaagaaaagaattgctgtgattgggggaggagtgagcgggctctcttccatcaagtgctgcgtagaagaaggcttggaacctgtctgctttgaaaggactgatgacatcggagggctctggaggttccaggaaaatcctgaagaaggaagggccagtatttacaaatcagtgatcatcaatacttctaaagagatgatgtgcttcagtgactatccaatcccagatcattatcccaacttcatgcataatgcccaggtcctggagtatttcaggatgtatgccaaagaatttgaccttctaaagtatattcgatttaagaccactgtgtgcagtgtgaagaagcagcctgattttgccacttcaggccaatgggaagtggtcactgaatctgaagggaaaaaggagatgaatgtctttgatggagtcatggtttgcactggccatcacaccaatgctcatctacctctggaaagcttccctggaattgagaagttcaaagggcagtacttccacagtcgagactataagaacccagagggattcactggaaagagagtcattataattggcattgggaattctggaggggatctggctgtagagattagccaaacagccaagcaggttttcctcagcaccaggagaggggcttggatcctgaatcgtgtaggggactacggatatcctgctgatgtgttgttctcttctcgacttacacattttatatggaagatctgtggccaatcattagcaaacaaatatttggaaaaaaagataaaccaaaggtttgaccatgaaatgtttggcctgaagcctaaacacagagctctgagtcagcatccaaccttaaatgatgacctgccaaatcgtatcatttctggcttggtgaaagtgaaaggaaatgtgaaggaattcacggagacagctgccatatttgaggatggctccagggaggatgacattgatgctgttatctttgccacaggctatagctttgactttccatttctggaagattccgtcaaagtggtcaaaaacaagatacccctgtataaaaaggtcttccctcctaacctggaaaggccaactcttgcaatcataggcttgattcagcccttaggagccattatgcccatttcagagctccaaggacgctgggccactcaggtatttaaaggtctaaagacattgccctcacagagtgaaatgatggcagaaatatctaaagctcaagaggaaattgacaaaaggtatgtggagagccaacgccataccattcagggagactacatagataccatggaagagcttgctgatttggtgggggtcaggcccaatctgctgtctctggccttcactgaccccaagctggcattacacttattactgggaccctgcactccaatccactatcgtgtacagggccctggaaagtgggatggggctcgaaaagctatcctcaccacagatgatcgcatcaggaagcctctgatgacaagagtagttgaaaggagtagttctatgacttcaacaatgacaataggcaagtttatgctagctcttgccttctttgctataattatagcttacttctagttgtcctattgtcactgccctgtttttcattgggaagcttatctacagatgccttcagaatctgacgagattgactctcagtttcatattgcccagaaatctactttaatgtctctttcgaaagcattaattcactttcctttttcctacaatgaaacctgttttccatttgtattaactcatctcccttccactcatgatccgtcactcttccttgtggtaatccctagactgggagctcaggtactcttttagtcatctttgtatgtctttagcagagttcttgacatgtggtaggtgcttaataaatgtttgttgtttatcaaattttatggtagggagagtaagtcagcatcggtataaaatcgcttactccacgtaactcttcttctgatagggtttgattttctattagaagctcaattttagttttttttcatattataactaaatatgtttcctgagagataagagaaataatgttcctacaatagttgtatgtatctaagataagacatatagatgcttaagacattttgtttcacttgctattcactagtgtacttgaaacatggtcatttttagcccttttccttaggaaccatgtctttattttctcaataaagaaattactttcaactca

SEQ ID NO: 119 - DNA, 2439 bp, Homo sapiens
cagcacccagctccccgccaccgccatggtccccgacaccgcctgcgttcttctgctcaccctggctgccctcggcgcgtccggacagggccagagcccgttgggctcagacctgggcccgcagatgcttcgggaactgcaggaaaccaacgcggcgctgcaggacgtgcgggactggctgcggcagcaggtcagggagatcacgttcctgaaaaacacggtgatggagtgtgacgcgtgcgggatgcagcagtcagtacgcaccggcctacccagcgtgcggcccctgctccactgcgcgcccggcttctgcttccccggcgtggcctgcatccagacggagagcggcggccgctgcggcccctgccccgcgggcttcacgggcaacggctcgcactgcaccgacgtcaacgagtgcaacgcccacccctgcttcccccgagtccgctgtatcaacaccagcccggggttccgctgcgaggcttgcccgccggggtacagcggccccacccaccagggcgtggggctggctttcgccaaggccaacaagcaggtttgcacggacatcaacgagtgtgagaccgggcaacataactgcgtccccaactccgtgtgcatcaacacccggggctccttccagtgcggcccgtgccagcccggcttcgtgggcgaccaggcgtccggctgccagcgcggcgcacagcgcttctgccccgacggctcgcccagcgagtgccacgagcatgcagactgcgtcctagagcgcgatggctcgcggtcgtgcgtgtgtcgcgttggctgggccggcaacgggatcctctgtggtcgcgacactgacctagacggcttcccggacgagaagctgcgctgcccggagccgcagtgccgtaaggacaactgcgtgactgtgcccaactcagggcaggaggatgtggaccgcgatggcatcggagacgcctgcgatccggatgccgacggggacggggtccccaatgaaaaggacaactgcccgctggtgcggaacccagaccagcgcaacacggacgaggacaagtggggcgatgcgtgcgacaactgccggtcccagaagaacgacgaccaaaaggacacagaccaggacggccggggcgatgcgtgcgacgacgacatcgacggcgaccggatccgcaaccaggccgacaactgccctagggtacccaactcagaccagaaggacagtgatggcgatggtataggggatgcctgtgacaactgtccccagaagagcaacccggatcaggcggatgtggaccacgactttgtgggagatgcttgtgacagcgatcaagaccaggatggagacggacatcaggactctcgggacaactgtcccacggtgcctaacagtgcccaggaggactcagaccacgatggccagggtgatgcctgcgacgacgacgacgacaatgacggagtccctgacagtcgggacaactgccgcctggtgcctaaccccggccaggaggacgcggacagggacggcgtgggcgacgtgtgccaggacgactttgatgcagacaaggtggtagacaagatcgacgtgtgtccggagaacgctgaagtcacgctcaccgacttcagggccttccagacagtcgtgctggacccggagggtgacgcgcagattgaccccaactgggtggtgctcaaccagggaagggagatcgtgcagacaatgaacagcgacccaggcctggctgtgggttacactgccttcaatggcgtggacttcgagggcacgttccatgtgaacacggtcacggatgacgactatgcgggcttcatctttggctaccaggacagctccagcttctacgtggtcatgtggaagcagatggagcaaacgtattggcaggcgaaccccttccgtgctgtggccgagcctggcatccaactcaaggctgtgaagtcttccacaggccccggggaacagctgcggaacgctctgtggcatacaggagacacagagtcccaggtgcggctgctgtggaaggacccgcgaaacgtgggttggaaggacaagaagtcctatcgttggttcctgcagcaccggccccaagtgggctacatcagggtgcgattctatgagggccctgagctggtggccgacagcaacgtggtcttggacacaaccatgcggggtggccgcctgggggtcttctgcttctcccaggagaacatcatctgggccaacctgcgttaccgctgcaatgacaccatcccagaggactatgagacccatcagctgcggcaagcctagggaccagggtgaggacccgccggatgacagccaccctcaccgcggctggatgggggctctgcacccagcccaaggggtggccgtcctgagggggaagtgagaagggctcagagaggacaaaataaagtgtgtgtgcaggg

SEQ ID NO: 120 - DNA, 11185 bp, Homo sapiens
gctgccccgagcctttctggggaagaactccaggcgtgcggacgcaacagccgagaacattaggtgttgtggacaggagctgggaccaagatcttcggccagccccgcatcctcccgcatcttccagcaccgtcccgcaccctccgcatccttccccgggccaccacgcttcctatgtgacccgcctgggcaacgccgaacccagtcgcgcagcgctgcagtgaattttccccccaaactgcaataagccgccttccaaggccaagatgttcataaatataaagagcatcttatggatgtgttcaaccttaatagtaacccatgcgctacataaagtcaaagtgggaaaaagcccaccggtgaggggctccctctctggaaaagtcagcctaccttgtcatttttcaacgatgcctactttgccacccagttacaacaccagtgaatttctccgcatcaaatggtctaagattgaagtggacaaaaatggaaaagatttgaaagagactactgtccttgtggcccaaaatggaaatatcaagattggtcaggactacaaagggagagtgtctgtgcccacacatcccgaggctgtgggcgatgcctccctcactgtggtcaagctgctggcaagtgatgcgggtctttaccgctgtgacgtcatgtacgggattgaagacacacaagacacggtgtcactgactgtggatggggttgtgtttcactacagggcggcaaccagcaggtacacactgaattttgaggctgctcagaaggcttgtttggacgttggggcagtcatagcaactccagagcagctctttgctgcctatgaagatggatttgagcagtgtgacgcaggctggctggctgatcagactgtcagatatcccatccgggctcccagagtaggctgttatggagataagatgggaaaggcaggagtcaggacttatggattccgttctccccaggaaacttacgatgtgtattgttatgtggatcatctggatggtgatgtgttccacctcactgtccccagtaaattcaccttcgaggaggctgcaaaagagtgtgaaaaccaggatgccaggctggcaacagtgggggaactccaggcggcatggaggaacggctttgaccagtgcgattacgggtggctgtcggatgccagcgtgcgccaccctgtgactgtggccagggcccagtgtggaggtggtctacttggggtgagaaccctgtatcgttttgagaaccagacaggcttccctccccctgatagcagatttgatgcctactgctttaaacctaaagaggctacaaccatcgatttgagtatcctcgcagaaactgcatcacccagtttatccaaagaaccacaaatggtttctgatagaactacaccaatcatccctttagttgatgaattacctgtcattccaacagagttccctcccgtgggaaatattgtcagttttgaacagaaagccacagtccaacctcaggctatcacagatagtttagccaccaaattacccacacctactggcagtaccaagaagccctgggatatggatgactactcaccttctgcttcaggacctcttggaaagctagacatatcagaaattaaggaagaagtgctccagagtacaactggcgtctctcattatgctacggattcatgggatggtgtcgtggaagataaacaaacacaagaatcggttacacagattgaacaaatagaagtgggtcctttggtaacatctatggaaatcttaaagcacattccttccaaggaattccctgtaactgaaacaccattggtaactgcaagaatgatcctggaatccaaaactgaaaagaaaatggtaagcactgtttctgaattggtaaccacaggtcactatggattcaccttgggagaagaggatgatgaagacagaacacttacagttggatctgatgagagcaccttgatctttgaccaaattcctgaagtcattacggtgtcaaagacttcagaagacaccatccacactcatttagaagacttggagtcagtctcagcatccacaactgtttcccctttaattatgcctgataataatggatcatccatggatgactgggaagagagacaaactagtggtaggataacggaagagtttcttggcaaatatctgtctactacaccttttccatcacagcatcgtacagaaatagaattgtttccttattctggtgataaaatattagtagagggaatttccacagttatttatccttctctacaaacagaaatgacacatagaagagaaagaacagaaacactaataccagagatgagaacagatacttatacagatgaaatacaagaagagatcactaaaagtccatttatgggaaaaacagaagaagaagtcttctctgggatgaaactctctacatctctctcagagccaattcatgttacagagtcttctgtggaaatgaccaagtcttttgatttcccaacattgataacaaagttaagtgcagagccaacagaagtaagagatatggaggaagactttacagcaactccaggtactacaaaatatgatgaaaatattacaacagtgcttttggcccatggtactttaagtgttgaagcagccactgtatcaaaatggtcatgggatgaagataatacaacatccaagcctttagagtctacagaaccttcagcctcttcaaaattgccccctgccttactcacaactgtggggatgaatggaaaggataaagacatcccaagtttcactgaagatggagcagatgaatttactcttattccagatagtactcaaaagcagttagaggaggttactgatgaagacatagcagcccatggaaaattcacaattagatttcagccaactacatcaactggtattgcagaaaagtcaactttgagagattctacaactgaagaaaaagttccacctatcacaagcactgaaggccaagtttatgcaaccatggaaggaagtgctttgggtgaagtagaagatgtggacctctctaagccagtatctactgttccccaatttgcacacacttcagaggtggaaggattagcatttgttagttatagtagcacccaagagcctactacttatgtagactcttcccataccattcctctttctgtaattcccaagacagactggggagtgttagtaccttctgttccatcagaagatgaagttctaggtgaaccctctcaagacatacttgtcattgatcagactcgccttgaagcgactatttctccagaaactatgagaacaacaaaaatcacagagggaacaactcaggaagaattcccttggaaagaacagactgcagagaaaccagttcctgctctcagttctacagcttggactcccaaggaggcagtaacaccactggatgaacaagagggcgatggatcagcatatacagtctctgaagatgaattgttgacaggttctgagagggtcccagttttagaaacaactccagttggaaaaattgatcacagtgtgtcttatccaccaggtgctgtaactgagcacaaagtgaaaacagatgaagtggtaacactaacaccacgcattgggccaaaagtatctttaagtccagggcctgaacaaaaatatgaaacagaaggtagtagtacaacaggatttacatcatctttgagtccttttagtacccacattacccagcttatggaagaaaccactactgagaaaacatccctagaggatattgatttaggctcaggattatttgaaaagcccaaagccacagaactcatagaattttcaacaatcaaagtcacagttccaagtgatattaccactgccttcagttcagtagacagacttcacacaacttcagcattcaagccatcttccgcgatcactaagaaaccacctctcatcgacagggaacctggtgaagaaacaaccagtgacatggtaatcattggagaatcaacatctcatgttcctcccactacccttgaagatattgtagccaaggaaacagaaaccgatattgatagagagtatttcacgacttcaagtcctcctgctacacagccaacaagaccacccactgtggaagacaaagaggcctttggacctcaggcgctttctacgccacagcccccagcaagcacaaaatttcaccctgacattaatgtttatattattgaggtcagagaaaataagacaggtcgaatgagtgatttgagtgtaattggtcatccaatagattcagaatctaaagaagatgaaccttgtagtgaagaaacagatccagtgcatgatctaatggctgaaattttacctgaattccctgacataattgaaatagacctataccacagtgaagaaaatgaagaagaagaagaagagtgtgcaaatgctactgatgtgacaaccaccccatctgtgcagtacataaatgggaagcatctcgttaccactgtgcccaaggacccagaagctgcagaagctaggcgtggccagtttgaaagtgttgcaccttctcagaatttctcggacagctctgaaagtgatactcatccatttgtaatagccaaaacggaattgtctactgctgtgcaacctaatgaatctacagaaacaactgagtctcttgaagttacatggaagcctgagacttaccctgaaacatcagaacatttttcaggtggtgagcctgatgttttccccacagtcccattccatgaggaatttgaaagtggaacagccaaaaaaggggcagaatcagtcacagagagagatactgaagttggtcatcaggcacatgaacatactgaacctgtatctctgtttcctgaagagtcttcaggagagattgccattgaccaagaatctcagaaaatagcctttgcaagggctacagaagtaacatttggtgaagaggtagaaaaaagtacttctgtcacatacactcccactatagttccaagttctgcatcagcatatgtttcagaggaagaagcagttaccctaataggaaatccttggccagatgacctgttgtctaccaaagaaagctgggtagaagcaactcctagacaagttgtagagctctcagggagttcttcgattccaattacagaaggctctggagaagcagaagaagatgaagatacaatgttcaccatggtaactgatttatcacagagaaatactactgatacactcattactttagacactagcaggataatcacagaaagcttttttgaggttcctgcaaccaccatttatccagtttctgaacaaccttctgcaaaagtggtgcctaccaagtttgtaagtgaaacagacacttctgagtggatttccagtaccactgttgaggaaaagaaaaggaaggaggaggagggaactacaggtacggcttctacatttgaggtatattcatctacacagagatcggatcaattaattttaccctttgaattagaaagtccaaatgtagctacatctagtgattcaggtaccaggaaaagttttatgtccttgacaacaccaacacagtctgaaagggaaatgacagattctactcctgtctttacagaaacaaatacattagaaaatttgggggcacagaccactgagcacagcagtatccatcaacctggggttcaggaagggctgaccactctcccacgtagtcctgcctctgtctttatggagcagggctctggagaagctgctgccgacccagaaaccaccactgtttcttcattttcattaaacgtagagtatgcaattcaagccgaaaaggaagtagctggcactttgtctccgcatgtggaaactacattctccactgagccaacaggactggttttgagtacagtaatggacagagtagttgctgaaaatataacccaaacatccagggaaatagtgatttcagagcgattaggagaaccaaattatggggcagaaataaggggcttttccacaggttttcctttggaggaagatttcagtggtgactttagagaatactcaacagtgtctcatcccatagcaaaagaagaaacggtaatgatggaaggctctggagatgcagcatttagggacacccagacttcaccatctacagtacctacttcagttcacatcagtcacatatctgactcagaaggacccagtagcaccatggtcagcacttcagccttcccctgggaagagtttacatcctcagctgagggctcaggtgagcaactggtcacagtcagcagctctgttgttccagtgcttcccagtgctgtgcaaaagttttctggtacagcttcctccattatcgacgaaggattgggagaagtgggtactgtcaatgaaattgatagaagatccaccattttaccaacagcagaagtggaaggtacgaaagctccagtagagaaggaggaagtaaaggtcagtggcacagtttcaacaaactttccccaaactatagagccagccaaattatggtctaggcaagaagtcaaccctgtaagacaagaaattgaaagtgaaacaacatcagaggaacaaattcaagaagaaaagtcatttgaatcccctcaaaactctcctgcaacagaacaaacaatctttgattcacagacatttactgaaactgaactcaaaaccacagattattctgtactaacaacaaagaaaacttacagtgatgataaagaaatgaaggaggaagacacttctttagttaacatgtctactccagatccagatgcaaatggcttggaatcttacacaactctccctgaagctactgaaaagtcacattttttcttagctactgcattagtaactgaatctataccagctgaacatgtagtcacagattcaccaatcaaaaaggaagaaagtacaaaacattttccgaaaggcatgagaccaacaattcaagagtcagatactgagctcttattctctggactgggatcaggagaagaagttttacctactctaccaacagagtcagtgaattttactgaagtggaacaaatcaataacacattatatccccacacttctcaagtggaaagtacctcaagtgacaaaattgaagactttaacagaatggaaaatgtggcaaaagaagttggaccactcgtatctcaaacagacatctttgaaggtagtgggtcagtaaccagcacaacattaatagaaattttaagtgacactggagcagaaggacccacggtggcacctctccctttctccacggacatcggacatcctcaaaatcagactgtcaggtgggcagaagaaatccagactagtagaccacaaaccataactgaacaagactctaacaagaattcttcaacagcagaaattaacgaaacaacaacctcatctactgattttctggctagagcttatggttttgaaatggccaaagaatttgttacatcagcaccaaaaccatctgacttgtattatgaaccttctggagaaggatctggagaagtggatattgttgattcatttcacacttctgcaactactcaggcaaccagacaagaaagcagcaccacatttgtttctgatgggtccctggaaaaacatcctgaggtgccaagcgctaaagctgttactgctgatggattcccaacagtttcagtgatgctgcctcttcattcagagcagaacaaaagctcccctgatccaactagcacactgtcaaatacagtgtcatatgagaggtccacagacggtagtttccaagaccgtttcagggaattcgaggattccaccttaaaacctaacagaaaaaaacccactgaaaatattatcatagacctggacaaagaggacaaggatttaatattgacaattacagagagtaccatccttgaaattctacctgagctgacatcggataaaaatactatcatagatattgatcatactaaacctgtgtatgaagacattcttggaatgcaaacagatatagatacagaggtaccatcagaaccacatgacagtaatgatgaaagtaatgatgacagcactcaagttcaagagatctatgaggcagctgtcaacctttctttaactgaggaaacatttgagggctctgctgatgttctggctagctacactcaggcaacacatgatgaatcaatgacttatgaagatagaagccaactagatcacatgggctttcacttcacaactgggatccctgctcctagcacagaaacagaattagacgttttacttcccacggcaacatccctgccaattcctcgtaagtctgccacagttattccagagattgaaggaataaaagctgaagcaaaagccctggatgacatgtttgaatcaagcactttgtctgatggtcaagctattgcagaccaaagtgaaataataccaacattgggccaatttgaaaggactcaggaggagtatgaagacaaaaaacatgctggtccttcttttcagccagaattctcttcaggagctgaggaggcattagtagaccatactccctatctaagtattgctactacccaccttatggatcagagtgtaacagaggtgcctgatgtgatggaaggatccaatcccccatattacactgatacaacattagcagtttcaacatttgcgaagttgtcttctcagacaccatcatctcccctcactatctactcaggcagtgaagcctctggacacacagagatcccccagcccagtgctctgccaggaatagacgtcggctcatctgtaatgtccccacaggattcttttaaggaaattcatgtaaatattgaagcaactttcaaaccatcaagtgaggaataccttcacataactgagcctccctctttatctcctgacacaaaattagaaccttcagaagatgatggtaaacctgagttattagaagaaatggaagcttctcccacagaacttattgctgtggaaggaactgagattctccaagatttccaaaacaaaaccgatggtcaagtttctggagaagcaatcaagatgtttcccaccattaaaacacctgaggctggaactgttattacaactgccgatgaaattgaattagaaggtgctacacagtggccacactctacttctgcttctgccacctatggggtcgaggcaggtgtggtgccttggctaagtccacagacttctgagaggcccacgctttcttcttctccagaaataaaccctgaaactcaagcagctttaatcagagggcaggattccacgatagcagcatcagaacagcaagtggcagcgagaattcttgattccaatgatcaggcaacagtaaaccctgtggaatttaatactgaggttgcaacaccaccattttcccttctggagacttctaatgaaacagatttcctgattggcattaatgaagagtcagtggaaggcacggcaatctatttaccaggacctgatcgctgcaaaatgaacccgtgccttaacggaggcacctgttatcctactgaaacttcctacgtatgcacctgtgtgccaggatacagcggagaccagtgtgaacttgattttgatgaatgtcactctaatccctgtcgtaatggagccacttgtgttgatggttttaacacattcaggtgcctctgccttccaagttatgttggtgcactttgtgagcaagataccgagacatgtgactatggctggcacaaattccaagggcagtgctacaaatactttgcccatcgacgcacatgggatgcagctgaacgggaatgccgtctgcagggtgcccatctcacaagcatcctgtctcacgaagaacaaatgtttgttaatcgtgtgggccatgattatcagtggataggcctcaatgacaagatgtttgagcatgacttccgttggactgatggcagcacactgcaatacgagaattggagacccaaccagccagacagcttcttttctgctggagaagactgtgttgtaatcatttggcatgagaatggccagtggaatgatgttccctgcaattaccatctcacctatacgtgcaagaaaggaacagttgcttgcggccagccccctgttgtagaaaatgccaagacctttggaaagatgaaacctcgttatgaaatcaactccctgattagataccactgcaaagatggtttcattcaacgtcaccttccaactatccggtgcttaggaaatggaagatgggctatacctaaaattacctgcatgaacccatctgcataccaaaggacttattctatgaaatactttaaaaattcctcatcagcaaaggacaattcaataaatacatccaaacatgatcatcgttggagccggaggtggcaggagtcgaggcgctgatccctaaaatggcgaacatgtgttttcatcatttcagccaaagtcctaacttcctgtgcctttcctatcacctcgagaagtaattatcagttggtttggatttttggaccaccgttcagtcattttgggttgccgtgctcccaaaacattttaaatgaaagtattggcattcaaaaagacagcagacaaaatgaaagaaaatgagagcagaaagtaagcatttccagcctatctaatttctttagttttctatttgcctccagtgcagtccatttcctaatgtataccagcctactgtactatttaaaatgctcaatttcagcaccgatggccatgtaaataagatgatttaatgttgattttaatcctgtatataaaataaaaagtcacaatgagtttgggcatatttaatgatgattatggagccttagaggtctttaatcattggttcggctgcttttatgtagtttaggctggaaatggtttcacttgctctttgactgtcagcaagactgaagatggcttttcctggacagctagaaaacacaaaatcttgtaggtcattgcacctatctcagccataggtgcagtttgcttctacatgatgctaaaggctgcgaatgggatcctgatggaactaaggactccaatgtcgaactcttctttgctgcattcctttttcttcacttacaagaaaggcctgaatggaggacttttctgtaaccagg

SEQ ID NO: 121 - DNA, 3187 bp, Homo sapiens
gaaagaaatctggtgcctgggggtccctgtgttcacccctagagtttgttttaaaatttttaattgaagcatgtgaagtgtacctgcagaaaagtgggaacatgatagtgtatggcttggtggattttcacaaactgaacatacctgtgtaatcagcatctagacccagacccagagcgtcacaaatatcccccatcctgggcttttcccagaggagatgggggcttctgaagatggacttacctgggacctgccccccatgagccaggacggtccccccacagtcagcctgtgcaaaggccccgtggccaggggtggaggagaatatgtgggtgtggacaggatgggagactgtggcctgaacaggagattttattatatctggagaccctgagagaccctgagacctggggcaccctggctggccaggtcagaagcatcctgactgcagaggtccgtgcagccacaccctcttccctgccagcaagctgtctgcggctcatcggaggcccctccgcctggagccttctatggacgtgatatgcctgtatctgtttttaattttcattcttcacttaggggaagtgaaatcgctcagagatgagatcctttaattgaaaacgaagtgtaacggaatctagtgtctttctaatgtggtaaaattctccatcaacatcacagtcagctggcagctgaacttcagaatctcacttacagcaggcgacacgggggtacaccgatgggtcacactgggtctgggggctccctggagctcctcctgcgtgtggtctggttaggagttgagttgtttgctccagggttattctcctcctcgagtcacagtcacacgaatacctgccttctctggctttcctgctatacacatattcacatggcgctcaagaagttaggctcatggcaacgtgtgtctttctctggacaactggcccagtttacagtgaaatggagaatttcaggtctccacgtctgcccaggaaagaacttcagctgactccacggggatctggaaatccacgaccaatcccgatcggctcttattagctccccgctccacaagacacctgtgctttggaaatccaccaccaatcccgatcggctcttattagctccccgctccacaagacacctgtgatctggaaatctaccaccaatcccgatcggctcttattagctccccgctccacaagacacctgtgacatcctccagggccacaggagcacgtgctgaccagttttcccttccagttcctgcacaaaaagtgtccagagggctgtttgcaaacactagtgcactttgtagcttttcaccctctgtcccagggaatctaggagagatgaggcccgtcagagtcaagagatgtcatccccccagggtctccaaggcatttccacactattggtggcacctggaggacatgcaccaaggcttgccagagccaacaggaagtgagcccagagcatggcacatgagcatcacccgctgatggtggcctgctgtgcctggtgccaacaggggcatcccggcccatacccctccagacaggaagcatgggtttgcccacagacctgtcgggtgctcctgtgagtggcctccagatgtctttgtgcataggcacaagtgggccagggctggagggaggtgggaaacctcatcatccggtgggccctgccaatcttaacccagaacccttaggtattcctggcagtagccatgacattggagcaccttcctctccagccagaggctgacctgagggccactgtcctcagatgacaccacccaggagcaccctaggtgaggggtgagggcccccttatgtgaacctcttgcctcttcctttctcccatcagagtggttggatggagccattggcctccttttcttcagcgggcccttcaacctctctgcaccatgttgtctggctgaggagctactagaaaagctgagtggagtctcctttccaacaggatgatgcatttgctcaattctcagggctggaatgagccggctggtcccccagaaagctggagtggggtacagagttcagttttcctctctgtttacagctccttgacagtcccacgcccatctggagtgggagctgggagtcagtgttggagaagaaacaacaaaagccaattagaaccactatttttaaaaagtgcttactgtgcacagatactcttcaagcactggacgtggattctctctctagccctcagcacccctgcggtaggagtgccgcctctacccacttgtgatggggtacagaggcacttgctcttctgcatggtgttcaataggctgggagttttatttatctcttcaaactttgtacaagagctcatggcttgtcttgggctttcgtcattaaaccaaaggaaatggaagccattcccctgttgctctccttagtcttggtcatcagaacctcacttggtaccatatagatcaaaagctttgtaaccacaggaaaaaataaactcttccatcccttaaagaatagaatagtttgtccctctcatgggaattgggctgtatgtatattgttcttcctccttagaatttagagatacaagagttctacttagaacttttcatggacacaatttccacaacctttcagatgctgatgtagagctattgggaaagaacttccaaactcaggaagtttgcagagagcagacagctagagataactcgggacccagagttggtcgacagatgttagatgtatcctagcttttagctataaaccactcaaagattcagcccccagatcccacagtcagaactgaatctgcgttgttgggaagccagcagtggccttgggaaggaagccatggctgtggttcagagagggtgggctggcaagccacttccggggaaaactccttccgccccaggtttcttcttctcttaaggagagattattctcaccaacccgctgccttcatgctgccttcaaagctagatcatgtttgccttgcttagagaattactgcaaatcagccccagtgcttggcgatgcatttacagatttctaggccctcagggttttgtagagtgtgagccctggtgggcagggttggggggtctgtcttctgctggatgctgcttgtaatccatttggtgtacagaatcaacaataaataatatacatgt

SEQ ID NO: 122 - DNA, 1992 bp, Homo sapiens
cagacatctgctcctcacatgaatgcactcacctcctagagaccaggctgccatcatgctctggaagcttgtggagaatgtcaagtacgaagatatctatgaggaccggcacgatggtgtcccgagccacagctcgcggctctcccagctgggctcggtgtcccaaggaccctactcgagcgccccgccgctgtcccacaccccgtcgtcggacttccagccgccctacttcccacccccctaccagccgctcccctaccaccagagccaggacccctactcccacgtcaacgacccctactccctgaacccactgcaccagccccagcaacatccctgggggcaacggcagcggcaagaagtgggttcggaagccggctctctcctgccccagcctcgggccgccttgccccagctctcgggccttgacccccggagggactaccactcggtccgccggccggacgtgctgctgcattcggcgcaccacggcctggacgcgggcatgggtgacagcctctcgctgcacggcctcggccatcccggaatggaagacgtccagtcagttgaagatgccaataacagcggcatgaatctattggaccagtctgtcattaaaaaagttccagttcctcccaaatcggtgacttctctaatgatgaataaagacggcttcctgggaggcatgtctgtcaacaccggcgaggtgttttgctccgtcccaggccgtttgtctctgctcagttcaacttcgaagtacaaagtaactgtgggagaagttcagagacggctgtcgccccctgaatgcctcaatgcatctctcctcggcggagtcctcagaagagccaaatcgaaaaatggggggagatctttgcgagaaaggctagaaaaaatcggtttgaatttacccgcgggcaggcgcaaagcagcaaatgtcacgttactcacctccctggtggaaggagaagctgttcacttagctagggattttgggtacatttgcgaaacggagtttcccgccaaagccgtctctgagtatttgaaccggcagcacacagacccgagtgacctgcactcccgaaagaatatgctgttggccaccaagcaactttgtaaagaatttacggatctactggcgcaggaccggacaccgatagggaacagccgacccagccccatcctggagccggggatccagagctgcctcacgcacttcagcctcatcacgcacggcttcggcgccccggccatttgcgccgcgctcacggccctgcagaactatctcaccgaggcgctcaaaggcatggacaagatgttcttgaacaacaccaccactaacaggcacacgtctggggaaggcccaggtagtaaaactggcgacaaggaggagaaacacaggaaatgaaaaatttttaaaaaaagaaggaaaaatgttttaaatacaaaaggaaaaacagacaaaaatttaattttagctttaaaatattggattggctttggaagaattatattaggtagaatacacatacaatcaaaatttaaaaaaaaaaagctaaataacttaaaaaaaaactgaggcgtacaacggagcaacaatatcggttctcagtgtctatttcaagatacatttggagacaaccgtccggattttccacttcggttctttcgagtttagtaatactgataataaaagaaaaccatgatttccccttccctttggaaaataaacataagactaaacatgagaaaaacgctaacttattggaagaaaatcggagaaacgttggtgtcaatgctttgagagctggttgactgagacgcacgaactttttaattttaaatatatttttaggaaactctcgcagtccccgccctccatctcacctcacccgtctcccaaccacccttttccatgttaccctcccttcctcacattgttacgggaatcttctgggatgaaaatgagtgtggttggaaaaaaaaaaaaaaaaa

SEQ ID NO: 123 - DNA, 942 bp, Homo sapiens
atgatacagacccacagagtctaacagatgtctctatattcctcctcctcaaactctcagaggatccagaactgcagcaggtcgtcgctgggctgttcctgtccatgtgcctggtcacggtgctggggaacctactcatcatcctggccgtcagccctgactcccacctccacacccccatgtacttgttcctctccaacctgtcccttgcctgacatcggtttcacctccaccacggtccccaagatgattgtggacatccagtctcacagcagagtcatctcctatgcaggctgcctgactcagatgtctctctttgccatttttggaggtatggaagagagacatgctcctgagtgtgatggcctatgaccggtttgtagccatctgtcaccctctatattgttcagccatctttaacccgtgtttctgtggcttcctagatttgttgtcttttttttttttttctcagtctttcagactcccagctgcacaacttgattgccttacaaatgacctgcttcaaggatgtggaaattcctaatttcttctgggaaccttctcaactctcccatcttgcatgttgtgacaccttcaccaggaacatcagtatttccctgctgccatatttggttttcttcccatcttggggacccttttctcttactgtaaaattgtttcctccattctgagggtttcatcatcaggtgggaagtataaaccttctccacctgtgggtctcacctgtcagttgtttgctgattttatggaacaggcattggagggtacctcggttcagatgtgtcatcttccccgagaaagggtgcagtggcctcagtgatgtacatggtggtcacccccatgctgaaccccttcatctacagcctgagaaacagggatatgaaaagtgtcctgcggcggccgcatggcagcacagtctaa

SEQ ID NO: 124 - DNA, 3969 bp, Homo sapiens
ggcccagaaatagcagcggcgcgttcccctcggcgcagagcgacgggcagaggcgagagacgccgcggggccgggcggcggccccggaaggatgctgctgagccccggcactgcctggctgcgagcacatgatggcgatacgggagctcaaagtgtgccttctcggggacactggggttgggaaatcaagcatcgtgtgtcgatttgtccaggatcactttgaccacaacatcagccctactattggggcatcttttatgaccaaaactgtgccttgtggaaatgaacttcacaagttcctcatctgggacactgctggtcaggaacggtttcattcattggctcccatgtactatcgaggctcagctgcagctgttatcgtgtatgatattaccaagcaggattcattttataccttgaagaaatgggtcaaggagctgaaagaacatggtccagaaaacattgtaatggccatcgctggaaacaagtgcgacctctcagatattagggaggttcccctgaaggatgctaaggaatacgctgaatccataggtgccatcgtggttgagacaagtgcaaaaaatgctattaatatcgaagagctctttcaaggaatcagccgccagatcccacccttggacccccatgaaaatggaaacaatggaacaatcaaagttgagaagccaaccatgcaagccagccgccggtgctgttgacccaagggccgtggtccacggtacttgaagaagccagagcccacatcctgtgcactgctgaaggaccctacgctcggtggcctggcacctcactttgagaagagtgagcacactggctttgcatcctggaagacctgcagggggcggggcaggaaatgtacctgaaaaggattttagaaaaccctgggaaaacccaccacaccaccacaaaatggcctttagtgtatgaaatgcacatggaggggatgtagttgcatttttgctaaaaaaaaaaaaaaacctttaaaaattgttggatgtgtacaaaagtcttactgccttattatgtgtatgggattctaaagtggcattccacttggatttcctgtgctacctatcccaaattcccagtaactacttcagtgtcattgcctttgttacctaaccaaccttcactgaaaggcaaatttagttcaggaggttagtttttagctagctttggaagtaagcctttatttattactttttggaggaaatcagagaagtgtcaatggaccgtcactcagactgagacttgagttattacagaagccaggaaaagtgtattagaaactgttgtctacaccacttttaattggtgaacaatttttctaagttatggtcatatatacccaaacaaaccaaatcaaactaaattactgcatataattttgggattgggtggcctagtttgaaagagtgatttaagtaatcactatgtaagtggtgagagatgcaggacatacacattattcaagagaccacctgacatgcatctcctccgcaggaatacattcgtcctctcttagagaagtttaacgcacatagtattattttactaagagaatatctcttggtgtcatatctaggggaagagaattaactagaattaaatttaatgtttgaatctaaatcattgggcaaacttctaataataacaattaataataggttacaggaaagccagccagaggaagtgtcagcactttaaaattctagaccccaaaaaactacaaaatcagaaaaagtatttttatgtttctagcttgaggagaagggctttagggctaaccagaggtctgaccctagaatgccaaggaactgagaatgggctccgatgaaaaccttccttttcagattccctgtctgctcaattaaagatgtttgaatccaaaggaagtcaaggaagaaaaagcatggaaaggaagagaactgattcctactgaaaattcaaattctattaccattctaactttcataaaaagttgggatcaagaagcagctgatttcctgccagggcttatattagggggtgattcttaaaggacattaggattggtgctcagaaatggttaatcatgctgtgtgctagccagggccagctggtaccttctttgccatgagcattcaagggacagctaacctttattgacaatctatattgcaaaagtcaggaaagaggttgtgagctgattggattaaagacctggcacttcagtaactcagcacgcttccacttcactcaacttaagagagttcattgacagtgttaggatgtgaaggctgggaaacacttattttgcttcaagagttccacttggctctcccaaataggtacctcaaaaactgttagcaagcggcatttggatgtcttgacaggggctttgcagggatttttagggttttttccacattgtccacattaatggttggcatgattgtgcttgcaggccaagaaatgatcataccccttgccaaaggtaaaaaaaaaaaaaaaaaaatgagttgaaaattgaagtgacctctttccagctgacttgcaggcttattttgtaacctttcctcatccagttttccctgagaacctgggtttatctctagatagctgttcaggttttttagctgaggggtaagtatcctagctgagagttttgcatctttgggctgggtttgcagtggttgtgttttgcataaaatgtctagtctttgccacagatagtgagctacccactaatgagcccatggttttatttcagaagcacatgagggtgtgaaaccactctgttacctttctgtattgtcttagctattcaagccagtcagaggataatatatatattctcatcagcactcagagtagtcagtgaagagagtaggatcacacttggggcacaccaggattcacataaacattgtatcttctctgtggatgctcaggccttgtctacaatgaggctttacaaccttccttgtttggctcgggattacttcctggctgtctaataattgaaccataaccatgtaatattatgtaaaggcctggaaattactgttgctaaaaaaagtcatgtagtttcatgtagtgtagcatccttggcatcgttttccaaaatttgttccttctcccttttttttttctttcgtgtgtggcatgagtgtgtatctgtgtaaatatgattgtatatgtgttactccgatatgtaatccatttcactggctgagtttggcccctagccatgtgttaatataaagtagggcatgggcttcccaatggaaatctctgagaatgacagtggagttgtgcaagcattttacattgccacataattgacttgccattttatggttaaaaacgggcacattaggcagttgaatatgacgttaccttgcagactaaaaggttgaaggcccgaaactaacttttagctaacaataagggctgtgccccaatggaaactgagttcattttctgagaaaggtttggatgactgaaatatttcctctacagtcaaggactttggcatgcggtggctgaaactgagcttttttgtgtgggctccagttctcactgttctgcaatgctcatggcaagttgaatggtgagctagcttataaattaaagagctctgaactgtattcagaccgactgggtatctagcttactgttttaacatcattgttgaaaccagaccctgtagtccagtggtgctgccctgttgtgcaaactgctcctttttctcgtgtttttgtaaagagcttccatctgggctggacccagttcttgcacatacaagacaccgctgcagtcagctaggacctttccgccatgtattctattctgtagtaaagcatttccatcaacaatgcctaattgtatctgttatttttggtttaacacacactgattcatactaataaatattttcagttttaaaaaaaaaaaaaaaaaaaaaaa

SEQ ID NO: 125 - DNA, 1424 bp, Homo sapiens
ggccggtggcgggactctggggaaaatggctgcgtcttcgagtggtgagaaggagaaggagcggctgggaggcggtttgggagtggcgggtggtaacagcacacgagagcggctgctgtctgcgcttgaggacttggaggtcctgtctagggaacttatagaaatgctggcaatttcaagaaaccaaaagttgttacaggctggagaggaaaaccaggtcctggagttgttaattcaccgagatggggaatttcaagaactaatgaaattggcacttaatcagggaaaaattcatcatgaaatgcaagttttagaaaaagaagtagagaagagagacagtgatattcagcagctacaaaaacagctaaaggaagcagaacaaatactggcaacagctgtttaccaagcgaaggagaaactcaagtcaatagaaaaagcaagaaaaggtgctatctcctctgaagaaataattaagtatgcacataggatcagtgcaagtaatgctgtatgtgctccactgacctgggttccaggggacccccggagaccctacccaactgatttagagatgagaagtgggttactgggtcagatgaacaatccttccactaatggcgtgaatggccatttaccaggagatgcacttgcagcaggaagattgccagatgtccttgctccacagtatccatggcagtcaaatgacatgtcgatgaatatgttaccaccaaatcatagtagtgactttttgttggaacctcctgggcataataaagaaaatgaagatgatgtagagattatgtcaacggactcctcaagcagtagtagtgagtctgattgaaaaacttaaaagacaatatacagaattgaatactgtagaattctgtttctttaacagtagcagggaaatgtaaactacaggtgacaaaaaatacccaggtaaacactggctttggtagaattgtgcagtcattaaaagtcaaaattttttgactttctttttaaagccaaagaccatagttttagttttaagccactaggtagatatttaggggaatagtcaaaatttactgttgaaaaagcagttgctatgtgctttcttaccctgttctgttccagttttgctggatttgtacatagccattctagaaatagagttgagggaaattatccatatacatatcactaataggcttcttggaattatttagaaaagcatttttaaactggcagtggatgactgaataggcatcatatttctttttgtgtgtcatttaaaagtaacaaaaactgccatttgacagtaaaggctcttggcttctgttggaggcatgggaaattgtctcaatttgtacagtttgtaattgtaatttttgtaaataaatttgtttgtacattgaaaaaaaaaaaaaaaaaaaaaaaaaaaa

SEQ ID NO: 126 - DNA, 2836 bp, Homo sapiens
ctccctcagcgtccggccgaggcgcggtgtatgctgagccgctgccgcagcgggctgctccacgtcctgggccttagcttcctgctgcagacccgccggccgattctcctctgctctccacgtctcatgaagccgctggtcgtgttcgtcctcggcggccccggcgccggcaaggggacccagtgcgcccgcatcgtcgagaaatatggctacacacacctttctgcaggagagctgcttcgtgatgaaaggaagaacccagattcacagtatggtgaacttattgaaaagtacattaaagaaggaaagattgtaccagttgagataaccatcagtttattaaagagggaaatggatcagacaatggctgccaatgctcagaagaataaattcttgattgatgggtttccaagaaatcaagacaaccttcaaggatggaacaagaccatggatgggaaggcagatgtatctttcgttctcttttttgactgtaataatgagatttgtattgaacgatgtcttgagaggggaaagagtagtggtaggagtgatgacaacagagagagcttggaaaagagaattcagacctaccttcagtcaacaaagccaattattgacttatatgaagaaatggggaaagtcaagaaaatagatgcttctaaatctgttgatgaagtttttgatgaagttgtgcagatttttgacaaggaaggctaattctaaacctgaaagcatccttgaaatcatgcttgaatattgctttgatagctgctatcatgacccctttttaaggcaattctaatctttcataactacatctcaattagtggctggaaagtacatggtaaaacaaagtaaatttttttatgttctttttttggtcacaggagtagacagtgaattcaggtttaacttcaccttagttatggtgctcaccaaacgaagggtatcagctatttttttttaaattcaaaaagaatatcccttttatagtttgtgccttctgtgagcaaaactttttagtacgcgtatatatccctctagtaatcacaacattttaggatttagggatacctgcttcctctttttcttgcaagttttaaatttccaaccttaagtgaatttgtggaccaaatttcaaaggaactttttgtgtagtcagttcttgcacaatgtgtttggtaaacaaactcaaaatggattcttaggagcattttagtgtttattaaataactgaccatttgctgtagaaagatgagaaaacttaagctttgttttactacaacttgtacaaagttgtatgacagggcatattctttgcttccaagatttgggttgggggcactaggggttcagagcctggcagaattgtcagctttagtctgacataatctaagggtatggggcaaggatcacatctaatgcttgtgtccttatactctattatatagtgttattcatgattcagctgatcttaacaaaattcgtagcagtggaaccttgaaatgcatgtggctagatttatgctaaaatgattctcagttagcattttagtaacacttcaaaggtttttttttgtttgttttctagacttaataaaagcttaggattaattagaagaagcaatctagttaaatttcccatttgtattttattttcttgaatacttttttcatagttatttgtttaaaaagatttaaaaatcattgcactttggtcagaaaaataataaatatatcttataaatgtttgattcccttccttgctatttttattcagtagatttttgtttggcatcatgttgaagcaccgaaagataaatgatttttaaaaggctatagagtccaaaggaatattcttttacaccaattcttcctttaaaaatctctgaggaatttgttttcgccttacttttttttcttctgtcacaatgctaagtggtatccgaggttcttaatatgagatttaaaatcttaaaatgtttcttattttcagcacttacatcatttggtacacagggtcaaatagggcaaataattttgtctttgtataatagatttgatatttaaagtcactggaaataggacaagttaatggatgtttttatattttaatagaatcatttatttctatgtgttatgaaattcacttaatgataaatttttcaacatacttgccattagaaaacaaagtattgctaagtactataacatattggccactaaaattcatattgagattatcttggtttcttggaagagataggaatgagttcttatctagtgttgcaggccagcaaatacagaggtggtttaatcaaacagctctagtatgaagcaagagtaaagactaaggtttcgagagcattcctactcacataagtgaagaaatctgtcagataggaatctaaatatttatagtgagattgtgaaagcaaccttaaagttttgaagaagactgatgagactaggtgctttgcttcctttcatcaggtatctttctgtggcatttgagaacagaaaccaagaaacatggtaattactaaattatgaggctttgctttttgtttgcttttaagtagaaaaacatgttggcaacattgagttttggagttgattgagataatatgacttaactagttttgtcattccatttgttaaagatacagtcaccaagaatgttttgagttttttgaaagaccccaatttaagccttgcttatttttaaattatttccattcagtgatgttggatgtatatcagttatttagtaaataatctcaataaattttgtgctgtggcctttgctaaaaaaaaaaaaaaaaaaaaaaaaaaaa

SEQ ID NO: 127 - DNA, 1677 bp, Homo sapiens
ggcacgagggggtgagggtctgcctgcctgtttctgtctgggtgtctgagttccaaaaaatgtgtgttgtttgttcctcctcatcctcttctgagactgttgtttttttagagcttgattgtgggagaaaagcttgtgtgaaattccctcttcacctccccaccccccaaaaaataaaagggggcataaactttattccactggagaagccctgggggtggctggagccagcctgctgagaagcgtggtgcagctgggtctgggacttcactagagcttactctggagcacctattttctgtgcacatgggagtgctccactccctagcagagcagagggaagtctctgccaggtacccacgccacaggcctcaggatggctttttgtctgagggcctcattaggcccagactgctgctgctggtaccagtctcctgagacactgcctccctggagcccatgcatgcccagctgttcttactgcttagtagccttgaagcagcacatctccactgtccctggcaggattgtgggaggcttcacaacccctgctttcctgacttcctcttctgcccaacactgggtgccccttcccagtttcccagcaggggcttcatgggccaccgtcagtgggtctgggcctgccagagtcgtcttgctcttcctcttgcttctaggcaaccacacttggcaagttaaatgtcccaagcaccttgtctcccttcccaagaacaaaccatttctgtgcacatccttggaggcgagatgagctccttgcagagggccagagtaagtgcaagtcatggagtgcaggcagaggggtccatggcttccccagcccagggagggtatcagtatcattcattctctctcccctcactggtatgggttcagagcaatgcctagggcccctctctgctcccctgcctagtggggtggtagtggctacctctcagccccaatagtccctgctcctcttagaatcttcaccaagtggcaggccacctctgggcaggaccacctgcgtctggcacccaggaggtgaggcagacaccatggttaggtgatagggtctgaacccagttggggagacagaggggttcagacttgggaagaatctgtcagtgtgcatggagtgaggtgtgtgtgtgtggatggatgtgcacgtgtgcatgctttttttctttttgccgtgaggacagttgaatttggggcatttttctacaagaagcagtcagccttctctcccccataaggactggctgtaaccttaagcccatcaaagttacttccagcctggagagaacctcaccaaacagctggtgtggcctgagggtggccatggtgggaaatgggcatgagaataaatacctccccaaattcaatctgagcccagcaggagaggatggtagggttgccagggctcagaagtgcaagctgattactcaccccaccctgcctcgccgcacctttcctttgtttccttgggtgaatgcaggagcagcagtggctgcccttcccacctggacagtggtgtgtgtagaaagccagctggatgtttgtggtggggcctcatggtgcctaggaggagataaagatgaggaggtttttccttattgtataaatgaatatttgtatgattaaattaacacacacaccaaaaaaaaaaaaaaaaaa

SEQ ID NO: 128 - DNA, 3837 bp, Homo sapiens
atcgcctcctccctccccaagatggcgtccttgctgcagtcggaccgggttctctatctagtccagggagaaaagaaggttcgggccccgctctcgcaactctacttctgccgctattgtagcgaactgcggtcgctggaatgtgtgtctcacgaggtggactcccattattgtcccagttgtttagaaaatatgccatcggctgaagccaaactaaaaaagaatagatgtgccaattgttttgactgtcctggctgcatgcacaccctctctactcgggccacgagcatctccacacagcttccagatgacccagccaagaccaccatgaagaaagcctattacctggcatgtggattttgtcgctggacgtctagagatgtgggcatggcagacaaatctgtagctagtggcggttggcaggaacctgaaaatcctcacacacaacggatgaacaaattgattgaatattaccagcagcttgctcagaaagagaaggttgagcgagatcgcaagaaactggcacgacgtagaaactatatgcctctggctttttcggacaaatatggtcttggaaccaggcttcagcgaccacgagctggtgcatccatcagtacccttgccggactttcccttaaagaaggagaggatcagaaagagataaagattgagccagctcaggctgtggatgaagtggaacctctacctgaagactattatacaagaccagtaaatttaacagaggtaacaacccttcagcagcgtctgttacagcctgacttccagccagtctgtgcttcacagctctatcctcgccacaaacatcttctgatcaaacggtccctgcgctgccgtaaatgtgaacataatttgagcaagccagaatttaacccaacgtcaatcaaattcaaaatccagctggtcgctgtcaattatattccagaagtgagaatcatgtcaattcccaaccttcgctacatgaaggagagccaggtcctcctgactcttacaaatccagttgagaacctcacccatgtgactctcttcgagtgtgaggagggggaccctgatgatatcaacagcactgctaaggtggtggtgcctcccaaagagctcgttttagctggcaaggatgcagcagcagagtacgatgagttggcagaacctcaagactttcaggacgatcctgacattatagccttcagaaaggccaacaaagtgggtattttcatcaaagttacaccacagcgtgaggagggtgaagtgaccgtgtgcttcaagatgaagcatgattttaaaaacctggcagcccccattcgccccattgaagaaagtgaccagggaacagaagtcatctggctcacccagcatgtggaacttagcttgggcccacttcttccttaaaaggttccactggagggcagatcccaaaggacagtatcaccgtaaacctgcgttaaaatgtggaagctgctgcttcattaggccttgtttataacgatgtacccatgcactacggaattctattgctaagaaagtgggagcataggcaaggcattgggaacacagggtagctgctgttgctcttgctctcacccctgttgacaccagtaagtctgtgtcttcctcactgaaccctgcacgttgagtaacagcagcataattccatcctaggaaagggggatgggtgttccttggaaatggcattgtatttaccacctgagaaactctgtactgtctcttgatctgatctcactaaggatcacaatgtcacagatgaaacttaaatgataacccaaaggtagacctgctgttaatgatccagcattggtcacaatgtaccaactgctttctgcattccgttaaatatcatctaacagtctaaaacatatcccttcattgccataatggctgccattttgccatagatttccatataactgaaaaactgaattgtcactttatctttagtatcatgatgattggaaaaacctgtgaagttgttaaggcactctcatttgccctctttttctaagtgaatacaggacacgtattagttgttcttaatttttttcccagtaaaatatggatcttttaagaagaatttgagaagcaaacaattacatgtcatgtcaagggggtagcagattccattcgttttcaatattgccacaatacccagggattaatgctgccacaggggggcaatctttatttgtcttacttcctaccccttccctgttctgcctctttaactcagttaagttgttctgtttgggacctggaaaagaacccaaagaaaacctgagtggacaggttcatttctggaatgcagaaaacattttaaaggctagatttttagaatattctcaactagcattctttccattgatttgaaggggaaattaactattataatctcttgaatccaaaactggatattaagaactttcccccttactaagtttaagacttttgtcatgtggtgagtcaaataagaccattttgattgtaaaccataaaatagttcagcaagtagcccacagttctggcctaacagcagacttgctgttttcacttggtatcctggagttgggttgctaaccttaatttctatgatgttttctaaaatgaaacttgataaagtagaccaccagctgcaccgtgttttctgtaaaagtattgttagtaagtggccaagagacttgaggaaaatacagattttttgtttaccttggtcttgttttaagtcttaaaaaattaaagataacattataatgtagaatacagatgggacatagtccttgtaagcttcccttgaaaatgttttaaatatttaggaagcttttaaaagacactaaattgtactctaaaagacactaaattgtactaattgtacaaaggtcaagccaattttatgaaacagtcctacagagtaatatatgtgatgcagtgtaagaaggaaaatactcatctctaacattatggtaataacatttagcctcttaggagttggagcagggggatgggtaattacagatttgcagactatagaaagagtttcatttttttgtgaccccacagagtctcaaatttttattccactacctgctagagcctactgtgaaatcactgctccatatttgccagtggaggaaatgggcatagagtagagaatagcttcatatgtttacacgtttgcatagactacacacatgtcatgcgtttatggcaggtagctggtatttattccccaaagtaataatgttgaagtatgggtctcatcattcccatacacagaaacacaaaacactttgatcataaacttttttcttcagaagccaaactaacttgcagaataatagagccactggtttaatgtttcctcaagataggttttagtgtaagctagtattctgtgtgttcgtagaaatgattcaatacctgcagctggtgaattaggaattgtatttgttgccttttttatattagatgaggtgcaaaaattttaatgctagtcagtatgcaccaccacaggaaagttagatcccattagcacttgagactacagctttggaaacttaggctaagttaatttggatttgttacttgattcacctactgaccttttcttttgtttgaagtgcttatcagcataatgagctaagtgtcatgcatatttgtgaagaaacacccttgtttggtcccttttgggacagagaggtactccttgatctttatgaatgaccggttactgttttgccttattgcttaacttaatgtagtgaaataaagcagaccaagcttgaaaaaaaaaaaaaaaaaaaaaaaaaaaaa

SEQ ID NO: 129 - DNA, 4020 bp, Homo sapiens
gtcaattgccctttagtcccaggactaaccggaagcttctgcaacaggaggacattgaaaataagatggaacccatccacataaggatttgcctcaaagggcactgcaaaaattgaacagaggaatcccaaggaagctgcctgaatttgcctgtatactctcgttctgcgacttataaaggaccagacaaatcaaattagtggttttggtttccgccagctgtggatgcctttgacattatgaccgcagaggattccaccgcagccatgagcagtgactcggccgccgggtcctcggccaaggtgcccgagggcgtggcgggcgcgcccaacgaggcagcactgctggcgctgatggagcgcacgggctacagcatggtgcaagagaacgggcagcgcaagtacggcggcccaccgcccggctgggagggcccgcacccgcagcgtggctgcgaggtcttcgtgggcaagatcccgcgcgacgtgtacgaggacgagctggtgcccgtgttcgaggccgtgggccgcacctacgagctgcgcctcatgatggactttgacggcaagaaccgcggctacgccttcgtcatgtactgccacaagcacgaggccaagcgcgcagtgcgtgagctcaacaactacgagatccgcccgggccgcctgctcggcgtgtgctgcagcgtggacaactgccgcctcttcatcggcgggatccccaagatgaagaagcgcgaggaaatcctggaggagattgccaaggtcaccgagggcgtgctggacgtgatcgtctacgccagcgcggccgacaagatgaagaaccgcggcttcgccttcgtggagtacgagagccaccgcgcggctgccatggctcgccgcaagctcatgcctggccgcatccagctgtggggccaccagatcgccgtggactgggccgagcctgagatcgacgtggacgaggacgtgatggagaccgtgaagatcctctacgtgcgcaacctcatgatcgagaccaccgaggacaccatcaagaagagcttcggccagttcaaccccggctgcgtggagcgcgtcaagaagatccgcgactacgccttcgtgcacttcaccagccgcgaggatgccgtgcatgccatgaacaacctcaacggcactgagctggagggctcgtgcctggaggtcacgctggccaagcccgtggacaaggagcagtactcgcgctaccagaaggcagccaggggcggcggcgcggctgaggcagcgcagcagcccagctacgtgtactcctgcgacccctacacactggcctactacggctacccctacaacgcgctcattgggcccaacagggactactttgtgaaagtagccatccctgccattggggctcagtattccatgtttccagcagctccagcccctaaaatgattgaagatggcaaaatccacacagtggagcacatgatcagccccattgctgtgcagccagacccagccagtgctgctgccgccgcagccgcggccgcagccgccgcagccgctgtcattcccactgtgtcgacgccaccacctttccagggccgcccaataactccagtatacacggtggctccaaacgttcagagaattcctactgccgggatctacggggccagttacgtgccatttgctgctccagctacagccacgatcgccacactacagaagaacgcggcagccgcggccgccgtgtatggaggatacgcaggctacatacctcaggccttccctgctgctgccattcaggtccccatccccgacgtctaccagacatactgaggctggtgaccagcacgaagacagaccacacaaacaccactgaaggaacgcttgactatttatgaagaaggaacatgttggattcacacatgcaacctgaaagtgaagaatgttagcagatttatttctgaattattttatatacatgaagttttcactagttttttaagactattttcaacttagcatgcctacgttcatacatttccaaaagacttgcaatggttcgtgccttcattccatcttttaaaaatttgtatgctgtactacatttgtatagaggtttttgttgttgtttttttaaggatatattttcagtatgaaggttattttcttaacttctgcactccagagatttctattttgtagtaccttcaataatatatcaactatatattaaaaaagcacacttgaggagctagggaactattttgaaaaatatatacaatatttaaagatacaaacagtagtgcttaaaaatactacataaagcattattttaaaggttatactggaaagtgcaattttaaaatgagtaaaacctctgtatttctgctggcattaagggttgatggtgttaccatgtatcatcatggcggtactattttttaaaagaaattaaacactggatctctccttaagccaacattgaaaagacttgccgcacttctgagtccaaacactggaaagctctccttgccaccgttagccggggctcattctccatgtgccttagccttaaacatgcccccactcccacatctctcaccctgtcccctcctccccagattcccaatcccaccgcaatgtttggcaagcctaggactgataagtagctctgatagaggagctggtggcttttatacttcttcctgggtttttgttggggtttgttgtttcgttgttttttgttttttttttgtttggttggggaagtattgtcttctacgtgtgctattttcagtagcagagtaagcacaaggttttaatcgagttgcataagacacctttgcatagctatttaattgcccaatgtaaaactttaatgccatttctaatgcttttattcatttttgaagtatgagtttgtagggacaaagaatgtatgttatcgtagacaagacccccagagactcttttcagcagaaagttatgcttctagttgccttaccatgtttcttgcaaaactgtccatggtcctcaagggtgttggaaacattatgtttattaaatgggcctctcttcctttgctgtgcacttgatgggtgaactggattggggtgtgcacatccaggaggaggaggagagacctgtagaagtttaaagatagtttgtaaatatcttctaatgcttgtttttagtccttttatgttggagaagttcatggtatgtagtttaatgcaaaatgaaaccattttatttcaatgttattaaaaaggtttgttttattaggaagttaatgtattgttgcagtgttttgtgcctgtttaaaggcttttgtttagcagagtgaatgtaaaatacagtaaaatgttaagattgtcatctactttttaaaaaaaaatatcaacttggaattgttttttaaaggctcaatcaaggaagtgaggtgtgcaataaggtagcaagtaaaacgcagttgcgtttttatgtcatgttagagatccatacaattttccactcacgggatttttgttgatggctgaattcttgtggattcataagaggatcatgcccttagcaagtacttttgttttgttttaaattaagagattcccaaatgcctttttccccctcatcttgaaatgagatgagtttttatgtgtaagcaatatttatttaactattctataaaattattgagtgcctactgaggcctttaagcaccgctaacattcctttccatcattcttttgaatgacataaaataattgtgcaatgttcctgatgatgtaccccacagctgcattcaaactcaaatctgtgggaatgagtgactcgaccaaatgtaattcggatcagatcctcatcccctgactgtgtgaaaaaagtactctccttctagtgaaggattgtcacagagtttcactggatgaaactatgacccagtattcttactgtattttacatgtgcctgtaaattattttgccgaaataagaagaagaagaggaagaaagaacagtagaaaaaaaaaataaaaaaaaa

SEQ ID NO: 130 - DNA, 4348 bp, Homo sapiens
gggaggcccagggagaacggggaagggacatttagtttgagacggtgctgagataggatcatgaaggaagaggtgaagggaattcctgtaagagtggcgctgcgttgtcgccctctggtccccaaagagattagcgagggctgccagatgtgcctttccttcgtgcccggagagcctcaggtggtggttggtacagataaatccttcacctacgattttgtatttgatccctctactgaacaggaagaagtcttcaatacagcagtagcgccactcataaaaggtgtatttaaaggatataatgcaacggtcctggcctatgggcagactggctctggaaaaacctattcaatgggaggtgcatatactgcagagcaagagaatgaaccaacagttggggttattcctagggtaatacaactgctcttcaaagaaattgataaaaagagtgactttgaatttactctgaaagtgtcttacttagagatttacaatgaagaaattttggatcttctatgtccatctcgtgagaaagctcaaataaatatacgagaggatcctaaggaaggcataaagattgtgggactcactgagaagactgttttggttgccttggatactgtttcctgtttggaacagggcaacaactctaggactgtggcctccacggctatgaactcccagtcgtcccgatctcatgccatctttacaatctccttagagcaaggaaagaaaagtgacaagaatagcagctttcgctccaagctgcatcttgtagacctcgctggatcagaaagacagaagaaaaccaaggctgaaggggatcgtctaaaagagggtattaatattaaccgaggcctcctatgcttgggaaatgtaatcagtgctcttggagatgacaaaaagggtggctttgcgccctacagagattccaagttgactcgactgcttcaagattctctaggaggtaatagccatactcttatgatagcctgtgtgagtcctgctgactccaatctagaggaaacattaaatacccttcgctatgctgacagagcaagaaaaatcaagaacaaacctattgttaatattgatccccagacagctgaacttaatcatctaaagcaacaggtacaacagctacaagtcttgttgctacaggcccatggaggtaccctgcctggatctataactgtggaaccatcagagaatctacaatccctgatggagaagaatcagtccctggtagaggagaatgaaaaattaagtcgtggtctgagcgaggcagctggtcagacagcccagatgttggagaggatcatttggacagagcaagcgaatgaaaaaatgaacgccaagctagaagagctcaggcagcatgcggcctgcaaactggatcttcaaaagctagtggagactttggaagaccaggaattgaaagaaaatgtagagataatttgtaacctgcagcaattgattacccagttatcggatgaaactgttgcttgcatggctgcagccattgatactgcggtggagcaagaagcccaagtagaaaccagtccagagacgagcaggtcttctgacgcttttaccactcagcatgctctccgtcaagcgcagatgtctaaggagctggttgagttgaataaagcgcttgcactgaaagaggccctggctaggaagatgactcagaatgacagccaactgcagcctattcagtaccaataccaggataacataaaagagccagaattagaagtcatcaatctgcaaaaggaaaaggaagaattggttcttgaacttcagacagcaaagaaggatgccaaccaagccaagttgagtgagcgccgccgcaaacgtctccaggagctggagggtcaaattgctgatctgaagaagaaactgaatgagcagtccaaacttctgaaactaaaggaatccacagagcgtactgtctccaaactgaaccaggagatacggatgatgaaaaaccagcgggtacagttaatgcgtcaaatgaaagaagatgctgagaagtttagacagtggaagcagaaaagagacaaagaagtaatacagttaaaagaacgagaccgtaagaggcaatatgagctgctgaaacttgaaagaaacttccagaaacaatccaatgtgctcagacgtaaaacggaggaggcagcagctgccaacaagcgtctcaaggatgctctccagaaacaacgggaggttgcagataagcggaaagagactcagagccgtggaatggaaggcactgcagctcgagtgaagaattggcttggaaacgaaattgaggttatggtcagtactgaggaagccaaacgccatctgaatgacctccttgaagatagaaagatcctggctcaagatgtggctcaactcaaagaaaaaaaggaatctggggagaatccacctcctaaactccggaggcgtacattctcccttactgaagtgcgtggtcaagtttcggagtcagaagattctattacaaagcagattgaaagcctagagactgaaatggaattcaggagtgctcagattgctgacctacagcagaagctgctggatgcagaaagtgaagacagaccaaaacaacgctgggagaatattgccaccattctggaagccaagtgtgccctgaaatatttgattggagagctggtctcctccaaaatacaggtcagcaaacttgaaagcagcctgaaacagagcaagaccagctgtgctgacatgcagaagatgctgtttgaggaacgaaatcattttgccgagatagagacagagttacaagctgagctggtcagaatggagcaacagcaccaagagaaggtgctgtaccttctcagccagctgcagcaaagccaaatggcagagaagcagttagaggaatcagtcagtgaaaaggaacagcagctgctgagcacactgaagtgtcaggatgaagaacttgagaaaatgcgagaagtgtgtgagcaaaatcagcagcttctccgagagaatgaaatcatcaagcagaaactgaccctcctccaggtagccagcagacagaaacatcttcctaaggatacccttctatctccagactcttcttttgaatatgtccagcctaagccaaaaccttctcgtgttaaagaaaagttcctggagcaaagcatggacatcgaggatctaaaatattgttcagagcattctgtgaatgagcatgaggatggtgatggtgatgatgatgagggggatgacgaggaatggaagccaacaaaattagttaatgtgtccaggaagaacatccaagggtgttcctgcaagggctggtgtggaaacaagcaatgtgggtgcaggaagcaaaagtcagactgtggtgtggactgttgctgtgaccccacaaagtgtcggaaccgccagcaaggcaaggatagcttgggcactgttgaacggacccaggattcagaaagctccttcaaactggaggatcctaccgaggtgaccccaggattgagcttctttaatcccgtctgtgccacccccaatagcaagatcctgaaagagatgtgcgatgtggagcaggtgctgtcaaagaagactcccccagctccctccccttttgacctcccagagttgaaacatgtagcaacagaataccaagaaaacaaggctccagggaagaaaaagaaacgggctctggccagcaacaccagcttcttctctggctgctcccctatcgaagaagaggcccactgaagttggagtcatcatctctacccccagtctggcttgggagatgctttcaggttgcagccagaaggggttttttaaatgacttctctggatttcaggtttcttgctgttgaaaaaaggaacaaagcgttactgaaaagaaggtaacctttgttggatgtgggccttagcctccaggtccagactactactctatgttctccagaagggtgctaagtcacctactgaagagagaaccaactgactttcctattgactcatcaggaaccagtcctcagtctggtcaagttgtttcttatttgtgagcagttcaggctatctcctgatggggatgaggccaaggctttcttatcttttggttgtctctgcttaatggaggagcctggcctaggatggaggcctggcttagatctttcattccacctcaggaatgaggttgtgatctttcctgtcctgaccctctctgaattatgtttcaatagtactcttgattgtctgccatgttgttgaagcaaatgaattatttttaaatgttaagtaagtaaataaaccttagcccgtctttttttttttttttttttttttttttttt

SEQ ID NO: 131 - DNA, 1919 bp, Homo sapiens
ggcgtgggctcccttccccctctgtgggtcccgcgaggagactctcgggctttgaggtgagacctgaagttccgctggccggtagtgtagcaggaaagggcaggtcctcccgggtcgtgagccagtagcctcctggggtggcaaggtgtagagaggggggcgttgaaaggacacccgctacccggcctgctttctaggggtctctttggattgaggacatcagcagcagtggaagggattttactggagacctgtcactgtcagagccttaaaatatcaccgacggggccttaatgtcaccgaggtagagagaaaagggcagtagccctagagactattgcgacacagtgtgcccctcataagtttttccagggaggggttctgtactgagttgacgccccaggagctgagcaccaggctttgcatccttgggaactcagcaaacgtttgttcagccaattgcaggtagcatggcccagggcttgattgaggtggagcgaaagttccttccagggcctggcacagaggagcggctgcaggagttggggggcaccctggagtaccgggtcaccttccgagacacctactatgacacccctgagctgagcctcatgcaggctgaccactggctgcgacgacgagaggatagtggatgggagctcaaatgtcctggagcagcaggtgtcttaggaccccacacggagtataaggaactcacagcggaacctacaattgtggcccaactctgtaaggtgctgcgggctgacggcctgggggctggagatgtggctgctgtgctgggcccactggggctgcaggaagtagctagttttgtgactaagcggagtgcctggaagctggtgctcttgggagctgatgaagaggagccacagctcagggtggacttggatacagccgactttggctacgctgtgggtgaggtagaggccctggtgcatgaggaggctgaagtaccaactgccctagagaagatccacaggctcagcagcatgcttggtgtgcctgcacaggagacagcaccagccaagctgattgtgtatctacagcgtttccggcctcaagactatcagcgcctgctagaagtgaacagctccagagagaggccacaggagactgaagatcctgaccactgcctgggctaggggtgtcacttcctagaaggggaagggaactctgggtctaacggagtccactcctgggcccactgtgcctctcccctcagtgtcccttctgacagtgactcctctctctccagcgctgcctgtttcttccccctcctctaagctactcttccttgagccctccctggctgcttcctctcgctcatccgtcagatgcaatctgtgggccgcccctctcccctggccgctaagcagcctccattgatttccgctcgtgtttataggatttccacttagccgtgatcagtagttaagcacaggaaaatcccttgccaccccccctcccttggtcgatgccattgattctgccagcggctcctaaaccgccttacagctgagttagaagatgaggagaggcagcagggatttccctgccttgggatgtgggaaacagaagaaaagttgaggaaatggttgggaatcgctgttagaactctagaaattctaatctgactttgccactgtgcccagctctggcccagagggtagagtgcctcctgtggaagtttaggggcaaatttgttccctgacctggagagggttagaaagaaccaacagctgccccctccccgcccccgtgttgagacaggttctcaaggctcaggggaagatgcatacctcctatgtaagaatgctcttcccttgctgttattcatacacactttccacttcaaatatacccaaatatggctttcctcaaaaaaaaaaaaaaaaaaa

SEQ ID NO: 132 - DNA, 3206 bp, Homo sapiens
gtttataacttgaaaaatcctctccgtctcccttccctgcctcctttcctttccctttcctctgccagtacaactagacccggcgtctggcgtccccggtgcccagcattctgcggggcaggcggattaattggaattcttcaaaatgtcaggtgtggtacccacagcccctgaacagcctgcaggtgaaatggaaaatcaaacaaaaccaccagatccaaggcctgatgctcctcctgaatacagttctcattttttaccaggaccccctggaacagctgtccctccacctactggctacccaggaggcttgcctatgggatactacagtccacagcaacccagtaccttccctttgtaccagccagttggtggtatccatcctgtccggtatcagcctggcaaatatcctatgccaaatcagtctgttccaataacatggatgccagggccaactcctatggcaaactgccctcctggtctggaatacttagttcagttggacaacatacatgttcttcagcattttgagcctctggaaatgatgacatgttttgaaactaataatagatatgatattaaaaacaactcagaccagatggtttacgttgtaaccgaagacacagatgactttaccaggaatgcctatcggacactaaggcccttcgtcctccgggtcactgattgtatgggccgagaaatcatgacaatgcagagacccttcagatgcacctgctgttgcttctgttgcccctctgccagacaagagctggaggtgcagtgtcctcctggtgtcaccattggctttgttgcggaacattggaacctgtgcagggcggtgtacagcatccaaaatgagaagaaagaaaatgtgatgagagttcgtgggccatgctcaacctatggctgtggttcagattctgtttttgaggtcaaatcccttgatggcatatccaacatcggcagtattatccggaagtggaatggtttgttatcagcaatggcagatgctgaccattttgacattcacttcccactagacctggatgtgaagatgaaagccatgatttttggagcttgcttcctcattgacttcatgtattttgaaagatctccaccacaacgttcaagatagagagacacagcaagccatcaactatggttaattttgaaaaatggaaaagttggattgggcttacagtcagcactcagttatttgcaagtgtatttctttgctttgtagagtatttttattgggtgttaactttgacagctgagagtgggcttgcaagaacacaatctaaaagtgtgtttcaattgagtatctctctagtagaataggagttcatcctgaaaagctgtgactcattaacccagtaaacatatacaaagtaagcttaaaacactataaacatgagataagggaaaatgaatccagagttctcatattaataggtagtgaaacaataaggctttttagagcagactttgttggcataaaataacctggcttctatccctaaccctttcctacctttcctctccgtcaacatgtcctcatactgaagacaaacttgtttcaatgatagtcttcatttttaaaaacaaaaaggcaggcagacagaaataatgatgttttcttgcactaagaaggtactacttgtacacatatatcaaaacctcattctgcaaagtttttgaaggtttcaatgggaaatttgattttattacaaaataaaacattttttaatgttaaagtttatatattccatgcttgttttctcattcactggcatggatgatcaggagctgcctatatatgaaggcagaatcagactatcaggaaaggagctggccagggccacagccagtcaagatctctgagcaacttagagacattggtgtcattatatgaagcttgcatttaatacatttatacataatacatttgtacatttaattcataacgtctcttggtcacagatgccttatatataaaataagttgccagatctctaagattgcctagtacacctttgtatctcatttgatgtgatacccagaagagatcattgttttttgtttttgtttttgtttttttcaagaagatccttcgtgatcaccatgctgttctcatggtaagaactggagttatgtttttaaatttgaaaatatgacattttatgtagcactatataaaaagtgaaagcgacaaattccaccgctgcttaatactgctttgcttctttttattgacatgatagatacatatgtatctacacagagtaataataataaaacacagtaaacattctatttctctatggtctacagcatgccagtaaataatatgtaggaccaataataaattatcaattacacatttttgtgttaactaattaaaagcatagtgtataagtgagtacactctaattaacttgcttctgttgcactttagttttctacctgcatatggactgcatttttttttttaacacagtcagtatgtagaatgggatgtattcttctgctgctgcttattaaataaagaaagcctgagtgttcttagatggggttattctgagatgagggtcttagcctacagttctttttgaaatgaaaggtgctttgttttttaattatattcatcttttcagggtaaatttgtttttctgagtttctcgtaatgctcatttttacatgctgctactagcttttttttttaaaaaaagtaaaagttgctgctttctaaaatattaattgccttatatttgaaagtgccattgcaatcgtaagtagactatgtatttcctataatgatgtctgatatttaaataggaaatcagacaaacaatattcagaaagtttaagcatataaactttttatttttaacttgcctagatccctgtattccaaaacctgctgcatcataataaatatatctatatatatttagcataagacgtgatatttttaatttcttttttaaaaaattatatttgtctcttagagttaaaattttctttatataatattgtcatatgtcatagttttaatacaattcacatgatttctatgtttcttaatgatattttgttgtgtaaaattgatcggattgattaaaaaacaaattctctggaatttgtgcgttcatgctttttcgtattctttatggcttttaaataaatatacaatggttaatagt

SEQ ID NO: 133 - DNA, 2087 bp, Homo sapiens
gttttttaggaagagtgtcccgcagagacccggcgggagctgccaggagctctgggattccagcggctggaagccacctgggaagcctggcctcagtgtggaagagaaggcagcaggattattacagaaccttgtgaagccaacgcgggcagccgccaggagctgcagaccgagaggatctcgtcctttcttgcggcccagggagaccaggcctttcattctgggctcgagaccaacaattcgaattccgaactccccctgcgtgtgggactcaaggttgcccagggctcacctctgatgggtgggcaggtgagcgcttccaacagcttctcgaggctgcactgcagaaatgccaacgaggactggatgtcggcactgtgtccccggctctgggatgtgcccctccaccacctctccatcccagggagccacgacacgatgacgtactgcctgaacaagaagtcccccatttctcacgaggagtcccggctgctgcagctgctgaacaaggccttgccctgcatcacgcgccctgtcgtgctgaaatggtccgtcacccaggcactggacgtcacagagcagctggatgccggggtgcggtacctggacctgcggatagcccacatgctggagggctcggagaagaacctgcactttgtccatatggtgtacacaacggcgctggtggaggacacactcacggaaatctcggagtggctggagcggcatccacgcgaggtggtcatcctggcctgcagaaacttcgaggggctgagcgaggacctgcacgagtacctggtcgcctgtatcaagaacatcttcggggacatgctgtgtcctcgtggggaggtgccgacactgcggcagctgtggtcccggggccaacaggtcatcgtctcctatgaagacgagagctccttgcgccggcaccacgagctgtggccaggagtcccctactggtggggaaacagggtgaagaccgaggccctcatccgatacctggagaccatgaagagctgcggccgcccaggagggttgttcgtggccggcatcaacctcacggagaacctgcagtacgttctggcgcacccgtccgagtccctggagaagatgacgctgcccaaccttccgcggctgagcgcgtgggtccgagagcagtgcccggggccgggttcacggtgcaccaacatcatcgcgggggacttcatcggcgcagacggcttcgtcagtgacgtcatcgcgctcaatcagaagctgctgtggtgctgacgggacccttctgaagttcgggacgcggcggctgcagtttcacccccgaatttccaaatggagtttcgctctcgttgccgaggctggagtgtagtagtgtgatcctggctcactgcaacctccacctcccgggttccagcaaattctcctgcctcagcctcccaagtagctgggattgcaggcgcccgccaccacgcccggataatttttgtgtgtttagcagagacggggtttcaccatgttggccaggctggtctcgatctcctgacctcaggtgatccacccgcctcggcctcccaaagtgctgggatgacaggcgtgagccaccgcgcccggcctatacctcattttctacatgtcgcttgttggagctgctggttcaagttcccagccagccaatggatgccagcaccatttttactcccctttcccaagcaaatcgtgcatttttgtctaacgagagacatcagtttctcaggatgatcctcaagaacgttatggagtccatgttgcaataggttctctttgggacctaatgactcattttccaaaaatccgcttctacttttggtacccggttgctacggtgaaatgaaggtgccccgcatccagaaagacgcactcctggaccacaaccggcggctacctcagccccacggctctgcaggatcagggctcgggcaggccccgcggagatgaagaatttgcagggagcctccctgacttccgtcggctgtgaatccttgtctgtcaggggcgtatccacaaaatcaccaaattcatacagatcgtttaaataaatgaacatcattaaagtc

SEQ ID NO: 134 - DNA, 1401 bp, Homo sapiens
ccgagtctcaccctcccaggcagctcctacactcaactgcttctctaggaaaggtctcacctccagcctggagcagtcgggattacagaaagccccatccttggcttagggagcgccatgacgactgaaattggttggtggaagctgactttcctccggaaaaagaaatccactcccaaagtgctgtatgagatccctgacacctatgcccaaacagagggagatgcagaacccccgaggcctgacgctggaggccccaacagcgactttaacacccgcctggagaagattgtggacaagagcacaaagggcaagcacgtcaaggtctccaactcaggacgcttcaaggagaagaagaaagtgagagccacgctggcagagaaccctaacctctttgatgatcacgaggaaggacggtcatcaaagtgaagggctgaggagggtgctagcacctcttggctccctgccatcagccagatctgagacaggaccttgccacgctggcctctttggccatagctgaagctgtggggccagttgatacctgctggcaggaaatggctgttttttaggtttgtatttatgtgccgccacttttgtaaggcctgggagatcccagggtcctccaccctccccctgaccacatacaaaggcactctagttcaagagtgaaaaatctcacccaggaggaacagccctccttgaagcaatggcagggccagcagggaggtgggcatggcagggaatggagagagtgagccagacagacttcacctccttactggacacagggtcaagggcgagtttcaattgctgctccctttactttctctacctgtgactactccctggaccaatcctgaggagggcacattttccagaagccacgtgataggggctggtttctgtggagccagaggcagagacactgaacttgagctcacctcctaacaccggcagtaaacttcctggaactttgccctcaggtgcggaggggacagaggaccctggcactctgttagggtgctgtagaagactagattgatggtagtttggcctgttagttcctgttttggccatgacttttgcagatggcaagtcacacaccctcaaagggaagctacacgggccaaatcgggggagtgggtggggaattttctcctctccctttcctactataatagtatttaagacatatcagctccagagatgagtcctggagccttgaattttgtttaacaaaataattgtaggtttctctctgtaataacaacgctggaaaggccgagaacctcttttatgctcatgtcttgcatttattgagatgactgtttctcatgcctttatgttccttcatgtaagtaaagtggacctttgtgctcaaaaaaaaaaaaaaaaaaa

SEQ ID NO: 135 - DNA, 3737 bp, Homo sapiens
ggcgtccgcgcacacctccccgcgccgccgccgccaccgcccgcactccgccgcctctgcccgcaaccgctgagccatccatgggggtcgcgggccgcaaccgtcccggggcggcctgggcggtgctgctgctgctgctgctgctgccgccactgctgctgctggcgggggccgtcccgccgggtcggggccgtgccgcggggccgcaggaggatgtagatgagtgtgcccaagggctagatgactgccatgccgacgccctgtgtcagaacacacccacctcctacaagtgctcctgcaagcctggctaccaaggggaaggcaggcagtgtgaggacatcgatgaatgtggaaatgagctcaatggaggctgtgtccatgactgtttgaatattccaggcaattatcgttgcacttgttttgatggcttcatgttggctcatgacggtcataattgtcttgatgtggacgagtgcctggagaacaatggcggctgccagcatacctgtgtcaacgtcatggggagctatgagtgctgctgcaaggaggggtttttcctgagtgacaatcagcacacctgcattcaccgctcggaagagggcctgagctgcatgaataaggatcacggctgtagtcacatctgcaaggaggccccaaggggcagcgtcgcctgtgagtgcaggcctggttttgagctggccaagaaccagagagactgcatcttgacctgtaaccatgggaacggtgggtgccagcactcctgtgacgatacagccgatggcccagagtgcagctgccatccacagtacaagatgcacacagatgggaggagctgccttgagcgagaggacactgtcctggaggtgacagagagcaacaccacatcagtggtggatggggataaacgggtgaaacggcggctgctcatggaaacgtgtgctgtcaacaatggaggctgtgaccgcacctgtaaggatacttcgacaggtgtccactgcagttgtcctgttggattcactctccagttggatgggaagacatgtaaagatattgatgagtgccagacccgcaatggaggttgtgatcatttctgcaaaaacatcgtgggcagttttgactgcggctgcaagaaaggatttaaattattaacagatgagaagtcttgccaagatgtggatgagtgctctttggataggacctgtgaccacagctgcatcaaccaccctggcacatttgcttgtgcttgcaaccgagggtacaccctgtatggcttcacccactgtggagacaccaatgagtgcagcatcaacaacggaggctgtcagcaggtctgtgtgaacacagtgggcagctatgaatgccagtgccaccctgggtacaagctccactggaataaaaaagactgtgtggaagtgaaggggctcctgcccacaagtgtgtcaccccgtgtgtccctgcactgcggtaagagtggtggaggagacgggtgcttcctcagatgtcactctggcattcacctctcttcagatgtcaccaccatcaggacaagtgtaacctttaagctaaatgaaggcaagtgtagtttgaaaaatgctgagctgtttcccgagggtctgcgaccagcactaccagagaagcacagctcagtaaaagagagcttccgctacgtaaaccttacatgcagctctggcaagcaagtcccaggagcccctggccgaccaagcacccctaaggaaatgtttatcactgttgagtttgagcttgaaactaaccaaaaggaggtgacagcttcttgtgacctgagctgcatcgtaaagcgaaccgagaagcggctccgtaaagccatccgcacgctcagaaaggccgtccacagggagcagtttcacctccagctctcaggcatgaacctcgacgtggctaaaaagcctcccagaacatctgaacgccaggcagagtcctgtggagtgggccagggtcatgcagaaaaccaatgtgtcagttgcagggctgggacctattatgatggagcacgagaacgctgcattttatgtccaaatggaaccttccaaaatgaggaaggacaaatgacttgtgaaccatgcccaagaccaggaaattctggggccctgaagaccccagaagcttggaatatgtctgaatgtggaggtctgtgtcaacctggtgaatattctgcagatggctttgcaccttgccagctctgtgccctgggcacgttccagcctgaagctggtcgaacttcctgcttcccctgtggaggaggccttgccaccaaacatcagggagctacttcctttcaggactgtgaaaccagagttcaatgttcacctggacatttctacaacaccaccactcaccgatgtattcgttgcccagtgggaacataccagcctgaatttggaaaaaataattgtgtttcttgcccaggaaatactacgactgactttgatggctccacaaacataacccagtgtaaaaacagaagatgtggaggggagctgggagatttcactgggtacattgaatccccaaactacccaggcaattacccagccaacaccgagtgtacgtggaccatcaacccaccccccaagcgccgcatcctgatcgtggtccctgagatcttcctgcccatagaggacgactgtggggactatctggtgatgcggaaaacctcttcatccaattctgtgacaacatatgaaacctgccagacctacgaacgccccatcgccttcacctccaggtcaaagaagctgtggattcagttcaagtccaatgaagggaacagcgctagagggttccaggtcccatacgtgacatatgatgaggactaccaggaactcattgaagacatagttcgagatggcaggctctatgcatctgagaaccatcaggaaatacttaaggataagaaacttatcaaggctctgtttgatgtcctggcccatccccagaactatttcaagtacacagcccaggagtcccgagagatgtttccaagatcgttcatccgattgctacgttccaaagtgtccaggtttttgagaccttacaaatgactcagcccacgtgccactcaatacaaatgttctgctatagggttggtgggacagagctgtcttccttctgcatgtcagcacagtcgggtattgctgcctcccgtatcagtgactcattagagttcaatttttatagataatacagatattttggtaaattgaacttggtttttctttcccagcatcgtggatgtagactgagaatggctttgagtggcatcagcttctcactgctgtgggcggatgtcttggatagatcacgggctggctgagctggactttggtcagcctaggtgagactcacctgtccttctggggtcttactcctcctcaaggagtctgtagtggaaaggaggccacagaataagctgcttattctgaaacttcagcttcctctagcccggccctctctaagggagccctctgcactcgtgtgcaggctctgaccaggcagaacaggcaagaggggagggaaggagacccctgcaggctccctccacccaccttgagacctgggaggactcagtttctccacagccttctccagcctgtgtgatacaagtttgatcccaggaacttgagttctaagcagtgctcgtgaaaaaaaaaagcagaaagaattagaaataaataaaaactaagcacttctggagacat

SEQ ID NO: 136 - DNA, 2477 bp, Homo sapiens
gcagaggtgcggccggggaggcgcgcggaggctggagctggaggcgcggcgccggtgagctgagaaccatgtgtgctcagtattgcatctcctttgctgatgttgaaaaagctcatatcaacattcgagattctatccacctcacaccagtgctaacaagctccattttgaatcaactaacagggcgcaatcttttcttcaaatgtgaactcttccagaaaacaggatcttttaagattcgtggtgctctcaatgccgtcagaagcttggttcctgatgctttagaaaggaagccgaaagctgttgttactcacagcagtggaaaccatggccaggctctcacctatgctgccaaattggaaggaattcctgcttatattgtggtgccccagacagctccagactgtaaaaaacttgcaatacaagcctacggagcgtcaattgtatactgtgaacctagtgatgagtccagagaaaatgttgcaaaaagagttacagaagaaacagaaggcatcatggtacatcccaaccaggagcctgcagtgatagctggacaagggacaattgccctggaagtgctgaaccaggttcctttggtggatgcactggtggtacctgtaggtggaggaggaatgcttgctggaatagcaattacagttaaggctctgaaacctagtgtgaaggtatatgctgctgaaccctcaaatgcagatgactgctaccagtccaagctgaaggggaaactgatgcccaatctttatcctccagaaaccatagcagatggtgtcaaatccagcattggcttgaacacctggcctattatcagggaccttgtggatgatatcttcactgtcacagaggatgaaattaagtgtgcaacccagctggtgtgggagaggatgaaactactcattgaacctacagctggtgttggagtggctgctgtgctgtctcaacattttcaaactgtttccccagaagtaaagaacatttgtattgtgctcagtggtggaaatgtagacttaacctcctccataacttgggtgaagcaggctgaaaggccagcttcttatcagtctgtttctgtttaatttacagaaaaggaaatggtgggaattcagtgtctttagatactgaagacattttgtttcctagtattgtcaactcttagttatcagattcttaatggagagtggctatttcattaagatttaatagttttttttggactaagtagtggaaaaacttttatacttaactgagacattttgtcaaggctaaaaaaaagtcttgcaaaatggggcagtggactgacaggctgacatagaaaataaactttgcccaatcacaacttgtgcctcccatccctggagtactgactggcaccggtaagacagaatctctctgaatccattactccatgcccccttgaggcactgttgaagaaatctcacttttcagccagggtactggttctggtacatatggatcataagtccatttggggaagactcgtttatacaggttcatcagtactgtgtcttgagattttagcttcccatcaaagctgcatttcatgtggccatgggtacctagaaagacatcagaacaagtcggtcaaattaaaagtagaaaattttaaagcaatgacttccaacccaacagtcatttagcaacactgcagaaatgcagacatggtctcaaatcccgtgtttccttacctaaaggttccttgatatgtcctctccggccccacttcgttctcagttccactggtttaaaccacagcacatcctcttagaatcaaacacattaaagaccaagatgaaacatttacccacaaaatgtaaacccaacctttataccacaaaggcaatcagatcccatcctcctccttcatacccacctctgttgaagaacatgtaacgtactactgccatcttagtaaaaattttgaaaggatgaccactcagaacaactctcttgatgaccattctgtctggatctactgacataagatggcctgtagcaatgaggctgtgcattcctaaaggacaaaagcaaagaagctatttaggaatttacaggccaaagtcttcatttattgcccagtccatttaaagacccatgcaagagcctggtttgtcatccctgccctagcccaatctgaggctaagattggtaaactgtaagcccacacttaaccttgtcaataggttcttgaaaacttgtacttcaagagaaatgatgtataacaaaaccatactttttctcatcagttgttacaaggaaaggatgttgaacaaaaggcagttatttgaggactggctatacactgtttcacgtaaaagttggagttttcattgttctattaacaatgttaaatgaagacttactgtattttgaaaaccatcattaccttctccataccatttggctcccaaatttaaataaacaagagaaaacggtgttcatct

SEQ ID NO: 137 - DNA, 1341 bp, Homo sapiens
aggtgtttgggtttcttcgcggctgctcaagatgaaccgactcttcgggaaagcgaaacccaaggctccgcgccccagcctgactgactgcattggcacggtggacagtagagcagaatccattgacaagaagatttctcgattggatgctgagctagtgaagtataaggatcagatcaagaagatgagagagggtcctgcaaagaatatggtcaagcagaaagccttgcgagttttaaagcaaaagaggatgtatgagcagcagcgggacaatcttgccaacagtcattcaacatggacaggccattataccatccagtctttgaaggacaccaagaccacggttgatgctatgaaactgggagtaaaggaaatgaagaaggcatacaagccagtgaagatcgaccagattgaggatttacaagaccagctagaggatatgatggaagatgcaaatgaaatccaagaagcactgagtcgcagttatggcaccccagaactggatgaagatgatttagaagcagagttggatgcactaggtgatgagcttctggctgatgaagacagttcttatttggatgaggcagcatctgcacctgcaattccagaaggtgttcccactgatacaaaaaacaaggatggagttctggtggatgaatttggattgccacagatccctgcttcatagatttgcatcattcaagcatatcttgtaaaacaaacacatattatgggactaggaaatatttatctttccaaatttgccataacagatttaggtttctttcctttctttgaaggaaagtttaattacattgctcttttattttttccattaagagactcattgcttgggaaatgctttcttcgtactaaaatttgattcctttttttcttatgaaaaacgaactcagtttaaaagtatttttagctcgtatgacttgttttcattcattaataataatttgaaataaaactaaggaaatggaatcttaaaagtctatgacagtgtaactctacagtctcaaaatgacctgataaattgataagacaaagatgagattattggggctgttcatattatgattcagaatcattttctattgtggtattataggttggttaaagtgatggcctttttgatgggttttgttgtgtcttgtgaacaagtcgttactgtgtccattattggaatggaattatcactactgtatcatgagtgggtattttgattctatggttccctcagtattacatcttgacttgtaatcaattatgaatatttcttgatatttaatgtataggacatttatttatactcaataaatatttttcaaaagg

SEQ ID NO: 138 - DNA, 2449 bp, Homo sapiens
cttgtccccagcgcctggactcccccttaactgcttgggaaatgtgacctttgctctggggggcctggccctgcaggccccaaccttccctcatctctggcggccctcttgggcctctgacccagcccctccccgggccaggctcacagaagctggcttctgggactgtcctgggcccaagtgggcacctgcgccagccccacctgtgcctgggctgtggccccttcctacagggcgctcaccatggccccgccgctcctgctgctgctgctggccagtggagcggccgcctgcccgctgccctgcgtctgccagaacctgtccgagtcgctcagcaccctctgtgcccaccgaggcctgctgtttgtgccgcccaacgtggaccggcgcacagtggagctgcggctggctgacaacttcatccaggccctggggccccctgacttccgcaacatgacgggactggtggacctgacactgtctcgcaatgccatcacccgcattggggcccgcgcctttggggacctcgagagcctgcgttccctccaccttgacggcaacaggctggtggagctgggcaccgggagcctccggggccccgtcaatctgcagcacctcatcctcagcggcaaccagctgggccgcatcgcgccgggagccttcgacgacttcctagagagcctggaggacctggacctgtcctacaacaacctccggcaggtgccctgggccggcatcggcgccatgcctgccctgcacaccctcaacctggaccataaccttattgacgcactgcccccaggcgccttcgcccagctcggtcagctctcccgcctggacctcacctccaaccgcctggccacgctggctccggacccgcttttctctcgtgggcgtgatgcagaggcctctcccgcccccctggtgctgagctttagcgggaaccccctgcactgcaactgtgagctgctgtggctgcggcggctggcgcggccggacgacctggaaacgtgcgcctccccgcccggcctggccggccgctacttctgggcagtgcccgagggcgagttctcctgtgagccgcccctcattgcccgccacacgcagcgcctctgggtgctggaaggccagcgggccacgctgcggtgccgggccctgggtgaccccgcgcctaccatgcactgggtcggtcctgacgaccggttggttggcaactcctcccgagcccgggctttccccaacgggaccttagagattggggtgaccggcgctggggacgctgggggctacacctgcatcgccaccaaccctgctggtgaggccacagcccgagtagaactgcgggtgctggccttgccccatggtgggaacagcagtgccgaggggggccgccccgggccctcggacatcgccgcctccgctcgcactgctgccgagggtgaggggacgctggagtctgagccagccgtgcaggtgacggaggtgaccgccacctcagggctggtgagctggggtcccgggcggccagccgacccagtgtggatgttccaaatccagtacaacagcagcgaagatgagaccctcatctaccggattgtcccagcctccagccaccacttcctgctgaagcacctcgtccccggcgctgactatgacctctgcctgctggccttgtcaccggccgctgggccctctgacctcacggccaccaggctgctgggctgtgcccatttctccacgctgccggcctcgcccctgtgccacgccctgcaggcccacgtgctgggcgggaccctgaccgtggccgtggggggtgtgctggtggctgccttactggtcttcactgtggccttgctggttcggggccggggggccggaaatggccgcctccccctcaagctcagccacgtccagtcccagaccaatggaggccccagccccacacccaaggcccacccgccgcggagccccccgccccggccgcagcgcagctgctctctggacctgggagatgccgggtgctacggttatgccaggcgcctgggaggagcttgggcccgacggagccactctgtgcatggggggctgctcggggcagggtgccggggggtaggaggcagcgccgagcggctggaagagagtgtggtgtgatggacgggcagcttcctgtgtgctccaagggatgagcctcgtggggcagagggcccggggccgccgcctggcctgggagtccctccctggtttttattctcagtacctcaggctcccctgtgtacttggaggggcagggagccctttcctcggttctggcctccagaccagggtaagggcaggcccctccaacaggtgctcacagccaccgaggcaggggctgcagccacccactgggagtcttgtttttatttataataaaattgttggggacacctcaaaaaaaaaaaaaaaaaaa

SEQ ID NO: 139 - DNA, 2175 bp, Homo sapiens
gcacactgaagagtacgtcttcgggtctacccctaatcacataatggctgtgtttaatcagaagtctgtctcggacatgattaaagagtttcgaaaaaattggcgtgctctttgtaactctgagagaactactctatgtggtgcagactccatgctcttggcattgcagctttctatggcagagaacaacaaacagtggagaatttacagtctctctcagtgatgttttattgacatggaaatacttgctccatgagaaattgaacttaccagttgaaaacatggacgtgactgaccattatgaggacgttaggaagatttatgatgatttcttgaagaacagtaatatgttagatctgattgatgtttatcaaaaatgtagggctttgacttctaattgtgaaaattataacacagtatctcctagtcaactactggattttctgtctggcaaacagtatgcagtaggtgatgaaactgatctttctataccaacatcaccaacaagtaaatacaaccgtgataatgaaaaggtgcagctgctagcaaggaaaattatcttttcatatttaaatctgctagtgaattcaaagaatgacctggctgtggcttatattctcaatattcctgatagaggactaggaagagaagccttcactgatttgaaacatgctgctcgagagaaacaaatgtctatctttttggtggccacgtcttttattagaacaatagagcttggagggaaaggatatgcaccaccaccatcagatcctttaaggacacatgtaaagggattgtctaattttattaatttcattgacaaattagatgagattcttggagaaataccaaacccaagcattgcagggggtcaaatactgtcagtgataaagatgcaactgattaaaggccaaaacagcagggatcctttttgcaaagcaatagaggaagttgctcaggatttggatttgaggattaaaaatattatcaattctcaagaaggtgttgtagctcttagcaccactgacatcagtcctgctcggccaaaatctcatgccataaaccatggtactgcatactgtggcagagatactgtgaaagccttattagttcttttggacgaagaagcagctaatgctcctaccaaaaacaaagcagagcttttatatgatgaggaagacacaatccatcatcatggaacgtctattcttacactttttaggtctcccacacaggtgaataatttgataaaacccctaagagaacgcatctgtgtgtcaatgcaagagaaaaaaattaagatgaagcaaactttaattagatcccaatttgcttgtacttataaagatgactacatgataagcaaggataattggaataatgttaatttagcatcaaagcctttgtgtgttctttacatggaaaatgacctttctgagggtgtaaatccatctgttggaagatcaacaattggaacgagttttggaaatgttcatctggacagaagtaaaaatgaaaaagtatcaagaaaatcaaccagtcagacaggaaataaaagctcaaaaaggaaacaggtggatttggatggtgaaaatattctctgtgataatagaaatgaaccacctcaacataaaaatgctaaaatacctaagaaatcaaatgattcacagaatagattgtacggcaaactagctaaagtagcaaaaagtaataaatgtactgccaaggacaagttgatttctggccaggcaaagttaactcagttttttagactataaatttgtgtcttatatgctttaggtttatgcatctataaaccattcaccaaagacatgcttaatttttaagagatcaaggtgtaaattatgatgatttattattttggtctacagtgtatgtaaggttagtatgttaagcactgtttttgactttttaaaaataccttagatgcaaatttataggagaaaaaacactttcagataagaggtgtttgctgggatggaagaactacctggcatgtaagaaatatcgtcagtcgtcctaatgcatattgtgactgtttgcatatacttctgtttataaaagtatcagttttacttttcagaggatttgtaagaatcatttaaattttcattgaaataaacgacaagtcacattgaaaaaaaaaaaaaaaaa

SEQ ID NO: 140 - DNA, 1834 bp, Homo sapiens
ggaagttgcaggcaatgagggacattgctatattaaaggaaaagcaggagaaagaaatacagacattacaggaggagacaaagaaagtccaagctgagacagcttcaaagacacgggaagtacaggcccagctcctccaggagaaaagattactggagaaacaactgagcgagccagacaggaggctactgggaaagagaaaaagaagagagcttaatatgaaggcccaggccttgaagttggcagcaaagcggtttatttttgaatactcctgtggcatcaacagagagaaccagcagttcaagaaggaattactgcagctaattgagcaagcccagaaactaacggctactcaaagccacttagaaaacaggaagcagcagctgcagcaggaacagtggtatctggagtccttaatccaggcgaggcagagactgcaaggaagtcataatcagtgcctaaatagacaggatgttccaaagaccacacccagtcttccccaaggcaccaaatcaaggattaatccaaagtaacttctaaaataacactgattaaataagaactggagcaagtactcttaagtgctacattaacctggttagaaaggctgttggattccagattgctattgtaaaatctccatcatgatgtgttggagtgaaggattagatggttttatccaacagtcctactagatatttggtaaccagcttcccttaactagctttttctttaaatactcgttaataagctattccacaaacctccagttaacctaacacatgaccctaacctagccatttaccatacatcaaactagctaaaggaaaccaacctaaggaagtgaaaacagttgtgatttatttcatctagctaaattgtatttctttatagagaaagtacctttaaggatagcattccaaatagactttgaatagcgttctgccagtttatcctcattccttttgaccaacttagcagacaaaagcagtttttacaagctctttgtgagtttgtgccagtgaccaggtagctccttctagttttctcatgagtgaaaaagcattctgataacagcaagtccagtaagtgctaggcagagtgacctttcacctgatgctaagcccctacaagtttgagaaggtaagaaaagatgaaggagacatatattaggtcagctcttacttttgaaaatgttttatttgaagaaacacctgtagcattgaggtgactgaatgcctccacttatttcaggaaaacgtatccaaaaaaagttgaaatatttggacaactttttttttaagtgccatcgatttccctagcagcattctaaaagatagcaagtaaaatgatgtttgttatcctaaatgctttagttttaggtcatttattaattttcttacaggtgcactttctagtacatgaagtatcctttgtaattaatgtgtgccatatgtttattcccatttagtataactataaattatattttaaattatatatttttaggatagttatattttttttgggttctacgacattgaagttggactagtgatttatttgaatgctgaatcctagtataggggaatataatcttatattttaacaggggtcctctatgggaaaataggatgaactttgtttcccagaaattgttaagtgatgaaaaacttcaaaataattttcctgcattttctgctttatttacatgtaaagtgaattccctgaaaattggatttaaaaagcattctccttcaatgtgcctttaccttgtagctttaacaacttttctgttaaatatgtagttttttattaaacaatgttattaaat

SEQ ID NO: 141 - DNA, 1286 bp, Homo sapiens
ggagcgcgcggtccgggcacacggagcaggttgggaccgcggcgggtaccggggccggggcgccatgcggaggccgagcgtgcgcgcggccgggctggtcctgtgcaccctgtgttacctgctggtgggcgctgctgtcttcgacgcgctcgagtccgaggcggaaagcggccgccagcgactgctggtccagaagcggggcgctctccggaggaagttcggcttctcggccgaggactaccgcgagctggagcgcctggcgctccaggctgagccccaccgcgccggccgccagtggaagttccccggctccttctacttcgccatcaccgtcatcactaccatcgggtacggccacgccgcgccgggtacggactccggcaaggtcttctgcatgttctacgcgctcctgggcatcccgctgacgctggtcactttccagagcctgggcgaacggctgaacgcggtggtgcggcgcctcctgttggcggccaagtgctgcctgggcctgcggtggacgtgcgtgtccacggagaacctggtggtggccgggctgctggcgtgtgccgccaccctggccctcggggccgtcgccttctcgcacttcgagggctggaccttcttccacgcctactactactgcttcatcaccctcaccaccatcggcttcggcgacttcgtggcactgcagagcggcgaggcgctgcagaggaagctcccctacgtggccttcagcttcctctacatcctcctggggctcacggtcattggcgccttcctcaacctggtggtcctgcgcttcctcgttgccagcgccgactggcccgagcgcgctgcccgcccccccagcccgcgccccccgggggcgcccgagagccgtggcctctggctgccccgccgcccggcccgctccgtgggctccgcctctgtcttctgccacgtgcacaagctggagaggtgcgcccgcgacaacctgggcttttcgcccccctcgagcccgggggtcgtgcgtggcgggcaggctcccaggcctggggcccggtggaagtccatctgacaaccccacccaggccagggtcgaatctggaatgggagggtctggcttcagctatcagggcaccctccccagggattggaaacggatgacgggcctctaggcggtcttctgccacgagcagtttctcattactgtctgtggctaagtcccctccctcctttccaaaaatatattacagtcacaccataaaaaaaaaaaaaaaaaaaaaaaaaaaaaaaaaaaaaaaaaa

SEQ ID NO: 142 - DNA, 4166 bp, Homo sapiens
caggtggaatgtcagaagactgagaacattgttccttcttcatactgctgctctgttgccagagaatcccaatttacactcaaagcttctttgattaagtgctaggagataaatttgcattttctcaaggaaaaggctaaaagtggtagcaggtggcatttaccgtcatggagagcagggatcataacaacccccaggagggacccacgtcctccagcggtagaagggctgcagtggaagacaatcacttgctgattaaagctgttcaaaacgaagatgttgacctggtccagcaattgctggaaggtggagccaatgttaatttccaggaagaggaagggggctggacacctctgcataacgcagtacaaatgagcagggaggacattgtggaacttctgcttcgtcatggtgctgaccctgttctgaggaagaagaatggggccacgccttttatcctcgcagcgattgcggggagcgtgaagctgctgaaacttttcctttctaaaggagcagatgtcaatgagtgtgatttttatggcttcacagccttcatggaagccgctgtgtatggtaaggtcaaagccctaaaattcctttataagagaggagcaaatgtgaatttgaggcgaaagacaaaggaggatcaagagcggctgaggaaaggaggggccacagctctcatggacgctgctgaaaaaggacacgtagaggtcttgaagattctccttgatgagatgggggcagatgtaaacgcctgtgacaatatgggcagaaatgccttgatccatgctctcctgagctctgacgatagtgatgtggaggctattacgcatctgctgctggaccatggggctgatgtcaatgtgaggggagaaagagggaagactcccctgatcctggcagtggagaagaagcacttgggtttggtgcagaggcttctggagcaagagcacatagagattaatgacacagacagtgatggcaaaacagcactgctgcttgctgttgaactcaaactgaagaaaatcgccgagttgctgtgcaaacgtggagccagtacagattgtggggatcttgttatgacagcgaggcggaattatgaccattcccttgtgaaggttcttctctctcatggagccaaagaagattttcaccctcctgctgaagactggaagcctcagagctcacactggggggcagccctgaaggatctccacagaatataccgccctatgattggcaaactcaagttctttattgatgaaaaatacaaaattgctgatacttcagaaggaggcatctacctggggttctatgagaagcaagaagtagctgtgaagacgttctgtgagggcagcccacgtgcacagcgggaagtctcttgtctgcaaagcagccgagagaacagtcacttggtgacattctatgggagtgagagccacaggggccacttgtttgtgtgtgtcaccctctgtgagcagactctggaagcgtgtttggatgtgcacagaggggaagatgtggaaaatgaggaagatgaatttgcccgaaatgtcctgtcatctatatttaaggctgttcaagaactacacttgtcctgtggatacacccaccaggatctgcaaccacaaaacatcttaatagattctaagaaagctgctcacctggcagattttgataagagcatcaagtgggctggagatccacaggaagtcaagagagatctagaggaccttggacggctggtcctctatgtggtaaagaagggaagcatctcatttgaggatctgaaagctcaaagtaatgaagaggtggttcaactttctccagatgaggaaactaaggacctcattcatcgtctcttccatcctggggaacatgtgagggactgtctgagtgacctgctgggtcatcccttcttttggacttgggagagccgctataggacgcttcggaatgtgggaaatgaatccgacatcaaaacacgaaaatctgaaagtgagatcctcagactactgcaacctgggccttctgaacattccaaaagttttgacaagtggacgactaagattaatgaatgtgttatgaaaaaaatgaataagttttatgaaaaaagaggcaatttctaccagaacactgtgggtgatctgctaaagttcatccggaatttgggagaacacattgatgaagaaaagcataaaaagatgaaattaaaaattggagacccttccctgtattttcagaagacatttccagatctggtgatctatgtctacacaaaactacagaacacagaatatagaaagcatttcccccaaacccacagtccaaacaagcctcagtgtgatggagctggtggggccagtgggttggccagccctgggtgctgatggactgatttgctggagttcagggaactacttattagctgtagagtccttggcaaatcacaacattctgggccttttaactcaccaggttgcttgtgagggatgagttgcatagctgatatgtcagtccctggcatcgtgtattccatatgtctataacaaaagcaatatatacccagactacactagtccataagctttacccactaactgggaggacattctgctaagattccttttgtcaattgcaccaaaagaatgagtgccttgacccctaatgctgcatatgttacaattctctcacttaattttcccaatgatcttgcaaaacagggattatcatccccatttaagaactgaggaacctgagactcagagagtgtgagctactggcccaagattattcaatttatacctagcactttataaatttatgtggtgttattggtacctctcatttgggcaccttaaaacttaactatccttccagggctcttccagatgaggcccaaaacatatataggggttccaggaatctcattcattcattcagtatttattgagcatctagtataagtctgggcactggatgcatgaattccactccttccagaaccaactgcattggttttccatgaccttaaggcagtagttctcaactggggggcaattttgcactgaagagagcatttggcagagtctgaagaagtttttggtgtcacagctttgtggggagcatgctatggcatttagtgggtaaagaccagggatgctgccaaacctgccttgcacaggacagcccctgcaacaaagaattatccagacaaaaatatcaatggtgctgaggttgagaaaacctgacttaaggggctgggatgcttttgaactagcttaaggcccaggactgtggagtgtgtggaccaccccacagaggagggactcagatttatttactcttgctggatctgtagtgatggagttccttctggtgtcagccccacaggaggctcccaggcctccctcacttcccatacccagtctaggagctccttctggctcccaagcacccagagctttcctccgccttttagttttggttcctccactggaatgtaggctcctcacgggcgatggctgtcttttcttgactttgtatcttcactgccaagcaaaaagtctgccaagtgggaatgtttaataaatattcattgaataatgaatgaaccatcttcgtacatgaataataatactgtcttacgtttttctggtgctttataatgtatacattacatctgagtattttattttatttaattttcaaaacaatcctttaaggtcaacattgttatccctattttgctgatgaggaaactaaggttagaaacattttgatttcctctaggacgtatagctaggaagtgttactatcttgatttgaacaaattttctggtgctaagtctgatgttctttccatgaatcattgtggtggttgagatggagctttgtaatgggaataaaacagtaccttaggttctttctgaaaaggaggtatctagcaatggataaatagataccactgaatgaaattaaatgttgattaggaacaaatttaaggcttaaaaaatactttatgagcagcaagattgctttaacttttaaaatgaagctttggttctctgatttgtaatgagcacctggacatgtcaattaaaatgcccatttgtgaagcttactcaataaaactttaaattgtcaaaaaaaaaaaaaaaaaa

SEQ ID NO: 143 - DNA, 3412 bp, Homo sapiens
agttttgctccgaaagacttaccgaggagggagcttgcggtgcgttctgggaaagttgctgggccagctcctttgtttccagtctgagcgttgcgttcggtttcccgagggtcttctgaggcaccgcggctgcgggcttctgagttcccggctctccgcagggaagcctcctcttcgtacctcgttttttggctcgtggggggtcctcccaccgctggccgacgcagccagcatgtccggggtgcgcgcagtgcggatcagcatcgaatcggcctgcgagaagcaggtccatgaggtgggcctggatggcaccgagacgtacctgcccccgctgtccatgtcgcagaatctggcgcgtctggcccagcggatagacttcagccagggttcgggctccgaggaggaggaggcggcggggaccgagggcgacgcgcaggagtggccgggcgccgggtccagcgcagaccaggacgacgaggaaggagtggtaaaatttcagccttccctttggccttgggactcagtgaggaacaatttgagaagtgccctgacagagatgtgtgttctctatgatgttctcagtattgttagggataaaaaatttatgactcttgatcctgtctctcaggatgcacttcctccaaaacagaatcctcagacgttgcaattgatatctaaaaagaagtcacttgctggagcagcacaaatcttattgaagggggcagaaagactgactaaatcagttaccgaaaaccaagaaaacaagctacaaagagacttcaattctgagcttttgcgattacggcaacactggaaacttcgaaaagttggagataaaattctcggagatctgagctacagaagtgcaggatctctctttcctcatcatggtacatttgaagtaataaagaatacagatctcgatctggataaaaagatacctgaagattactgtcctcttgatgtccaaattcctagtgatttagaggggtctgcatatatcaaggtttcaatacaaaaacaggctccagatataggtgacctcggcacagttaacctcttcaaacgacctttgcccaaatccaaaccaggttccccacattggcagacaaaattagaagcggcacagaatgttctcttatgtaaagaaatttttgcacagctctctcgggaagctgttcaaattaaatcacaagtccctcacattgtggtgaaaaaccagattatctctcagccctttccgagcttgcagttatctatttctttgtgccattcctcaaatgataagaaatcccaaaaatttgctactgagaagcaatgtccggaggaccacctttatgtcctagagcataatttgcatctactgattagagagtttcataaacagaccttgagttccatcatgatgcctcatccagcaagtgcaccttttggccacaagagaatgagactttcgggtcctcaagcttttgataaaaatgaaattaattcattacagtccagtgaagggcttctggaaaaaataattaaacaagcaaagcatatttttctaaggagtagagctgctgcaaccattgacagcttagcaagccgaattgaggatcctcagatacaggctcattggtcaaatatcaatgatgtttatgaatctagtgtgaaagttttaatcacatcacaaggctatgaacaaatatgcaagtccattcaactgcaattgaatattggagttgagcagattcgagttgtacatagagatggaagagtaattacactgtcttatcaggagcaggagctacaggattttcttctgtctcagatgtcacagcaccaggtacatgcagttcagcaactcgccaaggttatgggctggcaagtactgagcttcagtaatcatgtgggacttggacctatagagagcattggtaatgcatctgccatcacggtggcctccccaagtggtgactatgctatttcagttcgtaatggacctgaaagtggcagcaagattatggttcagtttcctcgtaaccaatgtaaagaccttccaaaaagtgatgttttacaagataacaaatggagtcatcttcgtgggccattcaaagaagttcagtggaataaaatggaaggtcgaaattttgtttataaaatggagctgcttatgtctgcacttagcccttgtctactatgattttttccagatgtttcctaaagaagtttccagaaactttgacttgaaatgtttgcagatcaactataagcacaaagaagagataacttccaaaagagtgctgtttttaaaaataataattaggaaatgtttatttagcactttcaaacttttcactttataaatgacaagtgctttgaaatgcagaagtttatgtacagttgtatatacagtatgacaagatgtaaaataatatgtttttcatgcagtttaaaatattactaacttaagggtttctatgtgctttttaaaatattccttctttgatgttgacatcaaataaagtatgtggtttaaaaaaatctccaaatacctttttttccccccaaatactttctaaactttttttttttgagatggtatctcactctgtagcccagtctggagtgcagtggtgtgatcatggttcactgcagtcttgacctcccaggcttaggtgatccttctgtctcagccttccgagtagctgggaccacaggcatgcacaaccacgcctggctaatttttgtattttttataaagacagggtttttccatgttgcccaggctggtttcgaactcggctcaagtgatctacctgcctctgcctcccaaagtgctaggattacaggcgtgagccaccatgcccagcctactctaaattattgataacctcttcctccagttgtctcctttaagctttcctgggtctaacctacataggtaatttaagaacatcctcagaaaggacagctgaaggcaataggaggcagattatctctttagggcgtcctcaagtttttttggtctgttctcccacttgattgacctcaccagttgagacacctagtgtatggctcatgcccagccttccacctgggattctccagcctccacccagcagccctggattgctttctccaattaaggcctttccatcagctctctgctttttcaaagcgaaaaaactaatggattagtgggttatcttttccaaggaacaggtttgcacttcttggaaaaagtgcctaaagtgtgcccattaatatgaggatagatttaggctcataagccttttggtaacactgaaagtagtatcatataggcaagctctccttataagtaaggctttcaatttttaaaacagacatcctgctttaacaatttgtaagatgactgtgcagtaataaaagtcctttgtatttc

SEQ ID NO: 144 - DNA, 6217 bp, Homo sapiens
cgcagactgtgctggagctggtgctgaaaaagggggtttgcagaggctgccctggggctggtgctgaaagaagagcccacagctgacttcatggtgctacaataacctcagaatctacttttcactctcaggagaacccacagtctaatatttagacatgatggcaaactgggcggaagcaagacctctcctcattcttattgttttattagggcaatttgtctcaataaaagcccaggaagaagacgaggatgaaggatatggtgaagaaatagcctgcactcagaatggccagatgtacttaaacagggacatttggaaacctgccccttgtcagatctgtgtctgtgacaatggagccattctctgtgacaagatagaatgccaggatgtgctggactgtgccgaccctgtaacgccccctggggaatgctgtcctgtctgttcacaaacacctggaggtggcaatacaaattttggtagaggaagaaagggacaaaagggagaaccaggattagtgcctgttgtaacaggcatacgtggtcgtccaggaccggcaggacctccaggatcacagggaccaagaggagagcgagggccaaaaggaagacctggccctcgtggacctcagggaattgatggagaaccaggtgttcctggtcaacctggtgctccaggacctcctggacatccgtcccacccaggacccgatggcttgagcaggccgttttcagctcaaatggctgggttggatgaaaaatctggacttgggagtcaagtaggactaatgcctggctctgtgggtcctgttggcccaaggggaccacagggtttacaaggacagcaaggtggtgcaggacctacaggacctcctggtgaacctggtgatcctggaccaatgggtccgattggttcacgtggaccagagggccctcctggtaaacctggggaagatggtgaacctggcagaaatggaaatcctggtgaagtgggatttgcaggatctccgggagctcgtggatttcctggggctcctggtcttccaggtctgaagggtcaccgaggacacaaaggtcttgaaggccctaaaggtgaagttggagcacctggttccaagggtgaagctggccccactggtccaatgggtgccatgggtcctctgggtccgaggggaatgccaggagagagagggagacttgggccacagggtgctcctggacaacgaggtgcacatggtatgcctggaaaacctggaccaatgggtcctcttgggataccaggctcttctggttttccaggaaatcctggaatgaagggagaagcaggtcctacaggggcgcgaggccctgaaggtcctcaggggcagagaggtgaaactgggcccccaggtccagttggctctccaggtcttcctggtgcaataggaactgatggtactcctggtcccaaaggcccaacgggctctccgggtacctctggtcctcctggctcagcagggcctcctggatctccaggacctcagggtagcactggtcctcaggggaattcgggccttccgggtgatccaggtttcaaaggagaagctggcccaaaaggggaaccagggccacatggtattcagggtccgataggcccacccggtgaagaaggcaaaagaggtcccagaggtgacccaggaacacttggtcctccagggccagtgggagaaaggggtgctcctggcaatcgtggttttccaggctctgatggtttacctgggccaaagggtgctcaaggagaacggggtcctgtaggttcttcaggacccaaaggaagccagggggatccaggacgtccaggggaacctgggcttccaggtgctcggggtttgacaggaaatcctggtgttcaaggtcctgaaggaaaacttggacctttgggtgcgccaggggaagatggccgtccaggtcctccaggctccataggaatcaaagggcagcccgggaccatgggccttccaggccccaaaggtagcaatggtgaccctgggaaacctggagaagcaggaaatcctggagttcctgggcaaaggggagctcctggaaaagatggtaaagttggtccttatggtcctcctgggccgccgggtctacgtggtgaaagaggagaacaaggacctccagggcccacaggttttcaggggcatcctggtcctccaggtcctcctggagaaggtggaaaaccaggtgatcaaggtgttcctggaggtcccggagcagttggcccgttaggacctagaggagaacgaggaaatcctggggaaagaggagaacctgggataactggactccctggtgagaagggaatggctggaggacatggtcctgatggcccaaaaggcagtccaggtccatctgggacccctggagatacaggcccaccaggtcttcaaggtatgccgggagaaagaggaattgcaggaactcctggccccaagggtgacagaggtggcataggagaaaaaggtgctgaaggcacagctggaaatgatggtgcaggaggtcttccaggtcctttgggccctccaggtccggcaggcctactgggagaaaagggtgaacctggtcctcgaggtttagttggtcctcctggctcccggggcaatcctggttctcgaggtgaaaatgggccaactggagctgttggttttgccggaccccaggggtctgacggacagcctggagtaaaaggtgaacctggagagccaggacagaagggagatgctggttctcctggaccacaaggtttagcaggatcccctggccctcatggtcctaatggtgttcctggactaaaaggtggtcgaggaacccaaggtccgcctggtgctacaggatttcctggttctgcgggcagagttggacctccaggccctgctggagctccaggacctgcgggacccctaggggaacccgggaaggagggacctccaggtcctcgtggggaccctggctctcatgggcgtgtgggagtccgaggaccagctggcccccctggtggcccaggagacaaaggggacccaggagaagatgggcaacctggtccagatggcccccctggtccagctggaacgaccgggcagagaggaattgttggcatgcctgggcaacgtggagagagaggcatgcccggcctaccaggcccagcgggaacaccaggaaaagtaggaccaactggtgcaacaggagataaaggtccacctggacctgtggggcccccaggctccaatggtcctgtaggggaacctggaccagaaggtccagctggcaatgatggtaccccaggacgggatggtgctgttggagaacgtggtgatcgtggagaccctgggcctgcaggtctgccaggctctcagggtgcccctggaactcctggccctgtgggtgctccaggagatgcaggacaaagaggagatccgggttctcggggtcctataggacacctgggtcgagctggaaaacgtggattacctggaccccaaggacctcgtggtgacaaaggtgatcatggagaccgaggcgacagaggtcagaagggccacagaggctttactggtcttcagggtcttcctggccctcctggtccaaatggtgaacaaggaagtgctggaatccctggaccatttggcccaagaggtcctccaggcccagttggtccttcaggtaaagaaggaaaccctgggccacttgggccattgggacctccaggtgtacgaggcagtgtaggagaagcaggacctgagggccctcctggtgagcctggcccacctggccctccgggtccccctggccaccttacagctgctcttggggatatcatggggcactatgatgaaagcatgccagatccacttcctgagtttactgaagatcaggcggctcctgatgacaaaaacaaaacggacccaggggttcatgctaccctgaagtcactcagtagtcagattgaaaccatgcgcagccccgatggctcgaaaaagcacccagcccgcacgtgtgatgacctaaagctttgccattccgcaaagcagagtggtgaatactggattgatcctaaccaaggatctgttgaagatgccatcaaagtttactgcaacatggaaacaggagaaacatgtatttcagcaaacccatccagtgtaccacgtaaaacctggtgggccagtaaatctcctgacaataaacctgtttggtatggtcttgatatgaacagagggtctcagttcgcttatggagaccaccaatcacctaatacagccattactcagatgacttttttgcgccttttatcaaaagaagcctcccagaacatcacttacatctgtaaaaacagtgtaggatacatggacgatcaagctaagaacctcaaaaaagctgtggttctcaaaggggcaaatgacttagatatcaaagcagagggaaatattagattccggtatatcgttcttcaagacacttgctctaagcggaatggaaatgtgggcaagactgtctttgaatatagaacacagaatgtggcacgcttgcccatcatagatcttgctcctgtggatgttggcggcacagaccaggaattcggcgttgaaattgggccagtttgttttgtgtaaagtaagccaagacacatcgacaatgagcaccaccatcaatgaccaccgccattcacaagaactttgactgtttgaagttgatcctgagactcttgaagtaatggctgatcctgcatcagcattgtatatatggtcttaagtgcctggcctccttatccttcagaatatttattttacttacaatcctcaagttttaattgattttaaatatttttcaatacaacagtttaggtttaagatgaccaatgacaatgaccacctttgcagaaagtaaactgattgaataaataaatctccgttttcttcaatttatttcagtgtaatgaaaaagttgcttagtatttatgaggaaattcttcttcctggcaggtagcttaaagagtggggtatatagagccacaacacatgtttattttgcttggctgcagttgaaaaatagaaattagtgcccttttgtgacctctcattccaagattgtcaattaaaaatgagtttaaaatgtttaacttgtgatcgagacctacatgcatgtcttgatattgtgtaactataatagagactctttaaggagaatcttaaaaaaaaaaaacgtttctcactgtcttaaatagaatttttaaatagtatatattcagtggcattttggagaacaaagtgaatttacttcgacttcttaaatttttgtaaaagactataagtttagacatctttctcattcaaatttaaagatatctttctcctcttgatcaatctatcaatattgatagaagtcacactagtatataccatttaatacatttacactttcttatttaagaagatattgaatgcaaaataattgacatatagaactttacaaacatatgtccaaggactctaaattgagactcttccacatgtacaatctcatcatcctgaagcctataatgaagaaaaagatctagaaactgagttgtggagctgactctaatcaaatgtgatgattggaattagaccatttggcctttgaactttcataggaaaaatgacccaacatttcttagcatgagctacctcatctctagaagctgggatggacttactattcttgtttatattttagatactgaaaggtgctatgcttctgttattattccaagactggagataggcagggctaaaaaggtattattatttttcctttaatgatggtgctaaaattcttcctataaaattccttaaaaataaagatggtttaatcactaccattgtgaaaacataactgttagacttcccgtttctgaaagaaagagcatcgttccaatgcttgttcactgttcctctgtcatactgtatctggaatgctttgtaatacttgcatgcttcttagaccagaacatgtaggtccccttgtgtctcaatactttttttttcttaattgcatttgttggctctattttaatttttttcttttaaaataaacagctgggaccatcccaaaagacaagccatgcatacaactttggtcatgtatctctgcaaagcatcaaattaaatgcacgcttttgtcatgtcaaaaaaaaaaaaaaa

SEQ ID NO: 145 - DNA, 851 bp, Homo sapiens
cccgcaagtgtacctcaatggcgagtttgtagggggctgtgacattcttctgcagatgcaccagaatggggacttggtggaagaactgaaaaagctggggatccactccgcccttttagatgaaaagaaagaccaagactccaagtgagggcggccaagtcctcgctgagcagagagggagccgttcatgtcagagactcactgccagaaaagccttacccattttggttttcactattgagaccgcaactgcttgcactgatcattttggttcatgagcagttggtgattttagttggtctggtgttcgggctaagaatattttattgtggacttaattacaaccactgcactgtaatgattcaatgctgtattatgatattgctgtaaacaaaattcattcttatattgtcacttattctttgcctgattcagaagttaaataggagctttggaatcattattcatgacccctctgcaaatgtgtcagtctccaaagagagtatctccccccaaattttgtgtagcttcttttgttatggaaaatggtggacaaaaaaagaaactgtgataactggggcgttgttttttaaaataaactccagcacagggatgctgtgcatgcctgagttgattccgaaaaaaaaaaaaaaaaaaaaaaaaaaaaaaaaaaaaaaaaaaaaaaaaaaaaaaaaaaaaaaaaaaaaaaaaaaaaaaaaaaaaaaaaaaaaaaaaaaaaaaaaaaaaaaaaaaaaaaaaaaaaaaaaaaaaaaaaaaaaaaaaaaaaaaaaaaaaaaaaaaaaaaaaaaaaaaaaaaaaaaaaaaaaaaaaaaaaaaaaaaaaaaaaaaaa

SEQ ID NO: 146 - DNA, 4268 bp, Homo sapiens
ctggagcagagccgctgggcgccggagccgaggcgagcgccgcgcgcaccactggttggagttgctgtgggtgagctgctgtggtctgtagccaagcatgctgtggtcggatctgcccagccgtggaacagaaacatttgctggatggaaaatccataaaagaaagctcctgtgaaaagctgaggctgacaataatttaagcaaaatcagatcgatctctttgggctgcctgacctccttgggtgcttgctattaattaacagactttgtggggaaaaaaaggagcttgccttctgagctttgtaccaaagacctgggaaaactaaccatctcagtctttcctgaggacttgggaactgccgaggcctctgccaatgtgttgactgtcgctatgggctcactgttgtccaggcagctcatatttcaaattataacctatttcctgcaccattgctgacgcctggtgatccatgtcagaagtacttccagctgactcaggtgttgacaccttggcagtgtttatggccagcagcggaactacagacgtcacaaatcggaacagcccagccacaccaccaaacacccttaacctccgatcctcccacaatgaactgttgaacgctgaaataaaacacacagaaaccaagaacagcacacctcccaaatgcaggaaaaaatatgcactaactaacatccaggcggccatgggcctctcggatccagctgcacagcccctgctgggaaatggctctgccaacatcaagctggtgaaaaatggggagaaccagctccgtaaggctgcagagcaagggcagcaggaccccaacaaaaacctgagccccactgcagtcatcaacataacttctgagaagttagagggtaaagagccccacccacaggattcctcgagctgtgagattttaccctcccagcccaggagaactaagagcttcctaaattactatgcagatctggaaacctcagccagagaactagagcagaaccgaggcaatcaccatgggactgcggaagagaaatcccagccagtccagggccaggcctccaccatcattgggaatggcgatttgctgctgcagaaaccaaacagaccccagtccagccctgaagacggccaagtagccacagtgtcatccagcccagaaaccaagaaggatcatccgaaaacaggggccaaaaccgactgtgcactgcaccggatccagaacctggcaccgagcgatgaggagtccagctggacaacgttgtcccaagacagtgcctcacccagctccccggatgaaacagatatatggagtgatcactcatttcagactgatccagatttgccgcctggctggaaaagagtcagtgacattgccgggacctattattggcacatcccaacaggaacgactcagtgggaacggcccgtctccatcccagcagatctccagggttctaggaaagggtcacttagttctgtaacgccatctcccaccccagagaacgaggatttgcatgcagccactgttaacccggaccccagtttaaaagagtttgaaggagcaaccctacgctatgcatctttgaaactcagaaatgccccacaccctgatgatgatgattcttgtagtatcaacagtgacccagaagccaagtgttttgctgtgcgttctctgggatgggtagagatggcagaagaggacctcgcccccggtaaaagtagtgttgcggtcaacaactgcatcaggcaactttcctactgcaaaaatgacatccgagacacagtcgggatttggggagaggggaaagacatgtacctgatcctggagaatgacatgctcagcctggtggaccccatggaccgcagcgtgctgcactcgcagcccatcgtcagcatccgcgtgtggggcgtgggccgcgacaatggccgggattttgcttatgtagcaagagataaagatacaagaattttgaaatgtcatgtatttcgatgtgacacaccagcaaaagccattgccacaagtctccacgagatctgctccaagattatggctgaacggaagaatgccaaagcgctggcctgcagctccttacaggaaagggccaatgtgaacctcgatgtccctttgcaagtagattttccaacaccaaagactgagctggtccagaagttccacgtgcagtacttgggcatgttacctgtagacaaaccagtcggaatggatattttgaacagtgccatagaaaatcttatgacctcatccaacaaggaggactggctgtcagtgaacatgaacgtggctgatgccactgtgactgtcatcagtgaaaagaatgaagaggaagtcttagtggaatgtcgtgtgcgattcctgtccttcatgggtgttgggaaggacgtccacacatttgccttcatcatggacacggggaaccagcgctttgagtgccacgttttctggtgcgagcctaatgctggtaacgtgtctgaggcggtgcaggccgcctgcatgttacgatatcagaagtgcttggtagccaggccgccttctcagaaagttcgaccacctccaccgccagcagattcagtaaccagaagagtcacaaccaatgtaaaacgaggggtcttatccctcattgacactttgaaacagaaacgccctgtcaccgaaatgccatagctgcacatgcaaaaggactcggctatttacctgaagattgactagctacactaaagaaaatgaactccgccatccgaccttccatccagttgctgatgctttgtcttcagagaatttacccttaaccaagcagtgttagacaagcatgttctctcgtcttgccaccatcatgtgatatgaaaagaagcatgaataattttttttgctgtaagttacatcatgcgcagtggaaggtctttttcttattgtaaatattgtgaacattacttaacttcacacacacacagagaagagtgtggccccacccctcctagtgaactaacgctgcgtccttggaatgaatgatgcgtgagttagtttcactgtcttcttggctggacctgtcacaagcaacctttaagtcctacagcactttgccctgttttcaacattggagtaggcactgcatagcagataccattgaattgctgtaaaaataggatggcgagtttgtgttttaatttttcataaaattgaacctgttggttgacaaaattggctgttggcatcagtatagaaaccaactggcagctttccctgacaagctctttgacacatggacaccatttcatgtctacagctgtttgtgggatgttggaaaaaaatgaaacttcaaaattgatgaaaaactaaattcgaggaattaaaatcgaacaaaacatagcctttcttttccgatggttttcaaactgattatttttaaaagagattaataaaatcataatgcattttgggtgggacatatttcaaacttctgccttatattgtacggtgcagctagagaattatagttcactatggccattctctacataaacattaagatgaaatactcctcatcagcctttcatccttagtttgagaattagctgatatgcaatttgaagttgaggaaatatcattgatatttctatcatgcacgattattttagatttctaccaccgtgtgatttttgctagtccatgtgctagaggtaaacgttctgctggaattctgcatccagctctatccccctctgatgctttttgcccagaaagctgtctgtccatcatgtattgtccatggcaacaaattacattaggttgaacctttccttgattttatgtatttaatattagaatttgttggactcaactagatatattttttaatttatattttttccattttactttgaagatttgaaatgttcatacctgagcaaagtctacacaggagtaatggactgtttaacaagtttcccaaaacagcattttcctgctccttcgtatgtaggtgagaaacttagctggaaagacatacaaatttagactctcgttgacattgtcgttttaaaaggaagttgctaaggcgatcaatctcaatattagtcttgtttacttcttcttaatgtcaaaattaacatttacaacatccaattataaaagtaatgctttatgtttataaaaaaaaaaaaaaaaaaaaaaaaaaaaaaaaaaaaaaaaaaaaaaaaaaaaaaaaaaaaaaaaaaaaaaaaaaaaaaaaaaaaaaaaaaaaaaaaaaaa

SEQ ID NO: 147 - DNA, 1167 bp, Homo sapiens
  misc_feature (415)..(415): n = a, t, g, or c
  misc_feature (559)..(559): n = a, t, g, or c
  misc_feature (602)..(602): n = a, t, g, or c
  misc_feature (612)..(612): n = a, t, g, or c
  misc_feature (621)..(621): n = a, t, g, or c
gaagcgctgggcggaagtggctgtggctttgccctttggcctttgctggctgtgtggcggctccgcggttcgcaggtcgttcgctgagcgtctctgcttagccgcggtcatgagccggcacagccggctgcagaggcaggttctgagcctgtaccgcgatctgctgcgcgccgggcgtgggaagccgggcgccgaggcgcgagtgcgggcagagttccggcagcatgcgggcctgccgcggtccgacgtgctgcgcatcgagtacctgtaccgccgcgggcggcgccagctgcagctgctacgctcgggccacgccaccgccatgggcgccttcgtacgcccgcgggccccgaccggggagcctggcggcgtgggttgccagcctgacgacggcgacagtccaaggaacccccacgacagcacgggggcaccggagacccgccccgacggacggtgacaggcgaagagccgaactcgctcgatggcgtggtggagccaggaggctcgcctgactgcatggggggactggggaacccgcctaaggtgagaggtcttaagagactagcttgacgaattggggatgtcagagactcctccttggcgacgcagggggcctagagagccccgtgatggacggcaagggaggcccgccttttccgatgcttggagacaggtcggtgctcctcccccatgagggcttggggcggcctgggacgctggcgggctggacagtgtcaagccaagagctacttgcccgaaggtacggggagccaggacgacccccggtggacagggagagcctgagacgcccttctcttgacccctgagaacatacccacttctggctcctcaaggagtctcccctctcctgtatttaactctgagaagtgcagactttttgctgagaacgttttgggaaggtgccctgatgagcggtgagaagcccggaatccccttctggaaaactttcccccattaattgtgacaagccaggaccatgaggaaggggtaggggtctatcaccctggttgatcaactgaagacccccaaaggcccctacttgatggttttgaggggcaacattgactcatttgccccttccctctcggaatgttggacaaagggaataaaattggggatatgtctttaacttagggggttccattc

SEQ ID NO: 148 - DNA, 2509 bp, Homo sapiens
ctgaagcctggggtcagcaggcgctgcgggcgcagctccggtgcaagcgaggacacgacacatgcagtggcttctggactgcgcgatgactggacgcaagtaacttctaggtctgcagacaagaggaagagaagatgaaggaagactgtctgccgagttctcacgtgcccatcagtgacagcaagtccattcagaagtcggagctcttaggcctgctgaaaacctacaactgctaccatgagggcaagagcttccagctgagacaccgtgaggaagaagggactctgatcatcgaggggctcctcaacattgcctgggggctgaggcggcccatccggctgcagatgcaggatgaccgggagcaggtgcacctcccctccacctcatggatgcccagacggcctagctgccctctaaaggagccatcgccccagaacgggaacatcacagcccaggggccaagcattcagccagtgcacaaggctgagagttccacagacagctcggggcccctggaggaggcagaggaggccccccagctgatgcggaccaagagcgacgccagttgcatgagccagaggaggcccaagtgccgcgcccccggtgaggcccagcgcatccggcgacaccggttctctatcaacggccacttctacaatcataagacctccgtgtttactccagcctatggatccgtgaccaatgtgagggtcaacagcaccatgacaaccctgcaggtgctcaccctgctgctgaacaaatttagggtggaagatggccccagtgagttcgcactctacatcgttcacgagtctggggagcggacaaaattaaaagactgcgagtacccgctgatttccagaatcctgcatgggccatgtgagaagatcgccaggatcttcctgatggaagctgacttgggcgtggaagtcccccatgaagtcgctcagtacattaagtttgaaatgccggtgctggacagttttgttgaaaaattaaaagaagaggaagaaagagaaataatcaaactgaccatgaagttccaagccctgcgtctgacgatgctgcagcgcctggagcagctggtggaggccaagtaactggccaacacctgcctcttccaaagtccccagcagtggcaggtgtacactgagccctggttgctggccccggccggtcacattgactgatggccaccgcctgacgaatcgagtgcctgtgtgtctacctctctgaagcctgagcaccatgattcccacagccagctcttggctccaagatgagcacccacaggaagccgacccaggcctgaggggccaggaacttgctgggtcagatctgtgtggccagccctgtccacaccatgcctctcctgcactggagagcagtgctggcccagcccctgcggcttaggcttcatctgcttgcacattgcctgtcccagagcccctgtgggtccacaagcccctgtcctcttccttcatatgagattcttgtctgccctcatatcacgctgccccacaggaatgctgctgggaaaagcagggcctgccagcaggtatgagatctagcctgctttcagccatcaccttgccacagtgtccccggcttctaagcctccaatatcaccctgtgagcctcgcacagctcagccccaacacagaggtgagaccaggaataaggccacaagtatctcactttctctgcagaaatcaatctttacttcatcagagagacctaaagcgattcttacaaggagcttgctgcaagaaacacggtcattcaatcacattgaggagggtccacatggcattgagagggtgctgcccgctcaatgcccagcagcagctctggaaggcagtgctcagccccatcaccactgtcccgtggatgcctgtgtacctcttgccttttctgggcttgcgtttctctcctctagtgggtggggatgactttcaatgactttcaatacttcccctgaaggaagaatgataaggagaaatgtctgttttgaggaaagggctttgaattccccagatactgaacaatttgtgtttgtgactgatggagaatttcaggaatgaatgagaaagcctttgcgaaactatgcaacagtttacatcagtcatgtgaagtatttgtctaaaacagagcaaactgaagaccaaattattctcctgttgaggtccgtggatggcagatttaaagggaagaaccacaaaggcttgcaaagataggagaggctccatctctaatgcatgtagaagctccttacgggtgcccatcaagagcatagcttggaagccaccatgctgtgcggaactgcgtcagggcaaatgtcacagcaggatttccccaacccagctccatcatcacagacacagagagctgcaggggaggcctgcccactgttttgtcgactctgccctcctctggcagcatagatccttaggtgctcaataaaggtgtgctgtattgaactgaagaagtgagaaaaaaaaaaaaaaaa

SEQ ID NO: 149 - DNA, 2387 bp, Homo sapiens
  misc_feature (541)..(541): n = a, t, g, or c
  misc_feature (706)..(706): n = a, t, g, or c
  misc_feature (805)..(805): n = a, t, g, or c
gtccccgccggggaggtcgggacgggcaggggctgaggaccccgcgccagcttgggagccctggagttctggcgggagggaagctgtcaaatggaagccggtagaaatgagacagacgcccggagaagcggggagccccgcccctccgccatagcagcctcgggcgccgcctcttcctttccagcctcccgccctcgtctgcttccggccctgtggcctggtggggctctgcaggctccctcgggagtggtccttgggccgtggcccctctgggaggcctgagggagctcaatcctggtagcaacacccctgaattcctggtggtgaaaggatgtggccccaggacccatcccggaaggaggtgctgaggtttgcagtcagctgccgtatcctgactctgatgctgcaggccctcttcaatgccatcatcccagatcaccatgcagaagccttctctcctcctcgcctggccccctcaggctttgtggaccaactcgtggaaggtcttctgggcggcctgtctcactgggatgctgaacacttcttgttcattgctgagcatggctacctgtatgagcacaactttgccttctttcctggtttccccttggccctgctggtggggactgaactgttgagacccttacgggggttactgagtctacgcagttgcctgctgatttcggtagcatcactcaatttcttgttcttcatgttggctgcagttgcacttcatgacctgggttgtctggttttgcactgtccccaccagtccttttatgcagctctgcttttctgtctcagccctgccaatgtcttcctggcagctggttactcagaagctttgtttgccctcctgacattcagtgccatggggcagctggagaggggccgagtctggactagtgtactcctctttgcctttgccactggggtacgctccaacgggctggtcagtgttggcttcctcatgcattctcaatgccaaggctttttctcttctctaacgatgctgaatcctctgagacagctctttaagctgatggcctctctgtttctgtcggtgttcacacttggccttccctttgccctctttcagtattatgcctacacccaattctgtctgccaggctcagcccgccccattcctgagcctttggtacagttagctgtagacaagggctaccggattgcagagggaaatgaaccgccttggtgcttctgggatgttccactaatatacagctatatccaggatgtctactggaatgttggctttttgaaatactatgagctcaagcaggtgcccaattttctactggctgcaccagtggctatactggttgcctgggcaacttggacatacgtgaccactcacccttggctctgccttacacttgggctgcaaaggagcaagaacaataagaccctagagaagcccgatcttggattcctcagtcctcaggtgtttgtgtacgtggtccacgctgcagtgctgctgctgtttggaggtctgtgcatgcatgttcaggttctcaccaggtttttgggctcctccactcctattatgtactggtttccagctcacttgcttcaggatcaagagccgctgttgagatccttaaagactgtgccttggaagcctcttgcagaggactccccaccaggacaaaaggtccccagaaatcctatcatgggacttttgtatcactggaaaacctgttctccagtcacacgatacattctaggctacttcctgacttactggctcctgggactactcctacattgcaacttcctgccttggacatgacctggactctccagggacaggttggaagccaacttaacccaggggtctgaaagtaaaaatacacattggaactgcctctgctgccctgggatcattactgtgtccattataatctttctctttctctttgaaagctggtcaggaatgggagaagtgtcagacactagagagccccttctggtcctggctagggcaaattttagacaactattttctctgtaagtgaagattgtcgtattccaagtctaaaatacacctggatctgtctagtcaatcaacatagcagagacagtcttaaacctaccattgacctgtgtgtaaatttaaatgtcaatttattgaagtgtaaatttcatcaaaggcattagctgacaggctggtaacagtccacacaagatggtataggcctgaacagtgtagtggcagtaataaagtgggaccattttttccaaatgcgacattgtttctgatgtttttttttatgatttgtgcatgtatttttatatgaaaaaaacttacaaagatatgcaaattaaacttctttcagttataaaaaaaaaaaaaaaaccgcttg

SEQ ID NO: 150 - DNA, 4917 bp, Homo sapiens
agaagatgtcttcgcggacggtgctggccccgggcaacgatcggaactcggacacgcatggcaccttgggcagtggccgctcctcggacaaaggcccgtcctggtccagccgctcactgggtgcccgttgccggaactccatcgcctcctgtcccgaggagcagccccacgtgggcaactaccgcctgctgaggaccattgggaagggcaactttgccaaagtcaagctggctcggcacatcctcactggtcgggaggttgccatcaagattatcgacaaaacccagctgaatcccagcagcctgcagaagctgttccgagaagtccgcatcatgaagggcctaaaccaccccaacatcgtgaagctctttgaggtgattgagactgagaagacgctgtacctggtgatggagtacgcaagtgctggagaagtgtttgactacctcgtgtcgcatggccgcatgaaggagaaggaagctcgagccaagttccgacagattgtttcggctgtgcactattgtcaccagaaaaatattgtacacagggacctgaaggctgagaacctcttgctggatgccgaggccaacatcaagattgctgactttggcttcagcaacgagttcacgctgggatcgaagctggacacgttctgcgggagccccccatatgccgccccggagctgtttcagggcaagaagtacgacgggccggaggtggacatctggagcctgggagtcatcctgtacaccctcgtcagcggctccctgcccttcgacgggcacaacctcaaggagctgcgggagcgagtactcagagggaagtaccgggtccctttctacatgtcaacagactgtgagagcatcctgcggagatttttggtgctgaacccagctaaacgctgtactctcgagcaaatcatgaaagacaaatggatcaacatcggctatgagggtgaggagttgaagccatacacagagcccgaggaggacttcggggacaccaagagaattgaggtgatggtgggtatgggctacacacgggaagaaatcaaagagtccttgaccagccagaagtacaacgaagtgaccgccacctacctcctgctgggcaggaagactgaggagggtggggaccggggcgccccagggctggccctggcacgggtgcgggcgcccagcgacaccaccaacggaacaagttccagcaaaggcaccagccacagcaaagggcagcggagttcctcttccacctaccaccgccagcgcaggcatagcgatttctgtggcccatcccctgcacccctgcaccccaaacgcagcccgacgagcacgggggaggcggagctgaaggaggagcggctgccaggccggaaggcgagctgcagcaccgcggggagtgggagtcgagggctgcccccctccagccccatggtcagcagcgcccacaaccccaacaaggcagagatcccagagcggcggaaggacagcacgagcacccccaacaacctccctcctagcatgatgacccgcagaaacacctacgtttgcacagaacgcccgggggctgagcgcccgtcactgttgccaaatgggaaagaaaacagctcaggcaccccacgggtgccccctgcctccccctccagtcacagcctggcacccccatcaggggagcggagccgcctggcacgcggttccaccatccgcagcaccttccatggtggccaggtccgggaccggcgggcagggggtgggggtggtgggggtgtgcagaatgggccccctgcctctcccacactggcccatgaggctgcacccctgcccgccgggcggccccgccccaccaccaacctcttcaccaagctgacctccaaactgacccgaagggttaccctcgatccctctaaacggcagaactctaaccgctgtgtttcgggcgcctctctgccccagggatccaagatcaggtcgcagacgaacctgagagaatcgggggacctgaggtcacaagttgccatctaccttgggatcaaacggaaaccgccccccggctgctccgattcccctggagtgtgaagctgaccagctcgcgccctcctgaggccctgatggcagctctgcgccaggccacagcagccgcccgctgccgctgccgccagccacagccgttcctgctggcctgcctgcacgggggtgcgggcgggcccgagcccctgtcccacttcgaagtggaggtctgccagctgccccggccaggcttgcggggagttctcttccgccgtgtggcgggcaccgccctggccttccgcaccctcgtcacccgcatctccaacgacctcgagctctgagccaccacggtcccagggcccttactcttcctctcccttgtcgccttcacttctacaggaggggaaggggccagggaggggattctccctttatcatcacctcagtttccctgaattatatttgggggcaaagattgtcccctctgctgttctctggggccgctcagcacagaagaaggatgagggggctcagcggggggagctggcaccttcctggagcctccagccagtcctgtcctccctcgccctaccaagagggcacctgaggagactttggggacagggcaggggcagggagggaaactgaggaaatcttccattcctcccaacagctcaaaattaggccttgggcaggggcagggagagctgctgagcctaaagactggagaatctgggggactgggagtgggggtcagagaggcagattccttcccctcccgtcccctcacgctcaaacccccacttcctgccccaggctggcgcggggcactttgtacaaatccttgtaaataccccacaccctcccctctgcaaaggtctcttgaggagctgccgctgtcacctacggtttttaagttattacaccccgaccctcctcctgtcagccccctcacctgcagcctgttgcccaataaatttaagagagtccccccctccccaatgctgaccctaggattttccttccctgccctcacctgcaaatgagttaaagaagaggcgtgggaatccaggcagtggtttttcctttcggagcctcggttttctcatctgcagaatgggagcggtgggggtgggaaggtaaggatggtcgtggaagaaggcaggatggaactcggcctcatccccgaggccccagttcctatatcgggccccccattcatccactcacactcccagccaccatgttacactggactctaagccacttcttactccagtagtaaatttattcaataaacaatcattgacccatgcctactccatgccaggcccagtgctggacacagagacatgaagctctgtctgtgggagacagggattctgacacagacaccggacaaaccattgtcttggggagcccagaagagaaagtgggcagggtggggtcattggggaagatgctctagaggaattaatgctggaatggggtgttgaaggatgagtaggagttagttaggcattgagtttgccctgggcaaaagcccagaagtgggagtatgtggtatatcttcagagaactgggtaatttcagtgtggctgctgtgttgggcatggatggagaatcagcaagagaaatgctgtattaggactaataatccatctacgctgcttaagcaaaaaggtatttgttggtttatgttacttaatagtccaggggcacctggcttcaggtaggtttgatccaggcatcaggccattgcatctattttttcagtgtaagttgaattctagtaatttttatcaagtaagggctcctttcctggtggcacagatgacttcagcagttagaagtttctatccctccagctttctgcagcagaaagaccctcattgtcagtttcccagcaaaagtcccagggcagactctcattggcccaaatgggccatgtgattttctctaaaccaatcactgtgactctagagtggccagactcagagctgcacttagtaggggttcctcaaaggaaggtcaagtgtcatgagcaggagaaaaggcatgggagctggacagattatagtggttgaagtctgtgcagtacagaagggcggagcttattcacacagcacctttggggccaaaatgaataagctggactttctccccatggcactggggaaccatggaagttcagggaacttcagggaagaggcttggtcaattcctgagagcatcctctgtgctggggacacagtggtaatcaagacagccccaacactgccctcatagagctcacagtccaatggaggaggcagatgtgtcctcaggcagcgactgggcagggctggtataggggagtccagaggtgatgcctgcctcagccagggagggcttcctggaggagaaggagccagctagacatggataggagtgcgttttaggcacagcaaatggcacatacaagggccagggagcaagagagaggacaggtcctcaacaaatggcatgtgactttgtaagtgtagaattgctgtgaggtatggggctaggggcgtcagtagggccttgaaggttatggacaggggcctgggctttcttccaagggcactgggggagccatggcaaggttgtaggtagggtagagatgggcgggtttgtgctatgtgcagggtggaagggagggaagttgacaggtcagaagatcaggaaagaggtcggggctggacagatggggagagcgcagatagatttaagagagtcctgtgaggcaaagtgggcaggacctggtaacaggtgtctggactgtggctttggctggctcagaaggtccccactggcgtgtgtggtctatgtagcctctgggtgtggagctgggatcttcaactggggacagtacagtaaagaacatcacagc

SEQ ID NO: 151 - DNA, 1804 bp, Homo sapiens
gtatcactcagaatctggcagccagttccgtcctgacagagttcacagcatatattggtggattcttgtccatagtgcatctgctttaagaattaacgaaagcagtgtcaagacagtaaggattcaaaccatttgccaaaaatgagtctaagtgcatttactctcttcctggcattgattggtggtaccagtggccagtactatgattatgattttcccctatcaatttatgggcaatcatcaccaaactgtgcaccagaatgtaactgccctgaaagctacccaagtgccatgtactgtgatgagctgaaattgaaaagtgtaccaatggtgcctcctggaatcaagtatctttaccttaggaataaccagattgaccatattgatgaaaaggcctttgagaatgtaactgatctgcagtggctcattctagatcacaaccttctagaaaactccaagataaaagggagagttttctctaaattgaaacaactgaagaagctgcatataaaccacaacaacctgacagagtctgtgggcccacttcccaaatctctggaggatctgcagcttactcataacaagatcacaaagctgggctcttttgaaggattggtaaacctgaccttcatccatctccagcacaatcggctgaaagaggatgctgtttcagctgcttttaaaggtcttaaatcactcgaataccttgacttgagcttcaatcagatagccagactgccttctggtctccctgtctctcttctaactctctacttagacaacaataagatcagcaacatccctgatgagtatttcaagcgttttaatgcattgcagtatctgcgtttatctcacaacgaactggctgatagtggaatacctggaaattctttcaatgtgtcatccctggttgagctggatctgtcctataacaagcttaaaaacataccaactgtcaatgaaaaccttgaaaactattacctggaggtcaatcaacttgagaagtttgacataaagagcttctgcaagatcctggggccattatcctactccaagatcaagcatttgcgtttggatggcaatcgcatctcagaaaccagtcttccaccggatatgtatgaatgtctacgtgttgctaacgaagtcactcttaattaatatctgtatcctggaacaatattttatggttatgtttttctgtgtgtcagttttcatagtatccatattttattactgtttattacttccatgaattttaaaatctgagggaaatgttttgtaaacatttattttttttaaagaaaagatgaaaggcaggcctatttcatcacaagaacacacacatatacacgaatagacatcaaactcaatgctttatttgtaaatttagtgtttttttatttctactgtcaaatgatgtgcaaaaccttttactggttgcatggaaatcagccaagttttataatccttaaatcttaatgttcctcaaagcttggattaaatacatatggatgttactctcttgcaccaaattatcttgatacattcaaatttgtctggttaaaaaataggtggtagatattgaggccaagaatattgcaaaatacatgaagcttcatgcacttaaagaagtatttttagaataagaatttgcatacttacctagtgaaacttttctagaattatttttcactctaagtcatgtatgtttctctttgattatttgcatgttatgtttaataagctactagcaaaataaaacatagcaaatgaaaaaaaaaaaaaaaaaaaaaaaaaaaaaaaa

SEQ ID NO: 152 - DNA, 5489 bp, Homo sapiens
ggctgagttttatgacgggcccggtgctgaagggcagggaacaacttgatggtgctactttgaactgcttttcttttctcctttttgcacaaagagtctcatgtctgatatttagacatgatgagctttgtgcaaaaggggagctggctacttctcgctctgcttcatcccactattattttggcacaacaggaagctgttgaaggaggatgttcccatcttggtcagtcctatgcggatagagatgtctggaagccagaaccatgccaaatatgtgtctgtgactcaggatccgttctctgcgatgacataatatgtgacgatcaagaattagactgccccaacccagaaattccatttggagaatgttgtgcagtttgcccacagcctccaactgctcctactcgccctcctaatggtcaaggacctcaaggccccaagggagatccaggccctcctggtattcctgggagaaatggtgaccctggtattccaggacaaccagggtcccctggttctcctggcccccctggaatctgtgaatcatgccctactggtcctcagaactattctccccagtatgattcatatgatgtcaagtctggagtagcagtaggaggactcgcaggctatcctggaccagctggccccccaggccctcccggtccccctggtacatctggtcatcctggttcccctggatctccaggataccaaggaccccctggtgaacctgggcaagctggtccttcaggccctccaggacctcctggtgctataggtccatctggtcctgctggaaaagatggagaatcaggtagacccggacgacctggagagcgaggattgcctggacctccaggtatcaaaggtccagctgggatacctggattccctggtatgaaaggacacagaggcttcgatggacgaaatggagaaaagggtgaaacaggtgctcctggattaaagggtgaaaatggtcttccaggcgaaaatggagctcctggacccatgggtccaagaggggctcctggtgagcgaggacggccaggacttcctggggctgcaggtgctcggggtaatgacggtgctcgaggcagtgatggtcaaccaggccctcctggtcctcctggaactgccggattccctggatcccctggtgctaagggtgaagttggacctgcagggtctcctggttcaaatggtgcccctggacaaagaggagaacctggacctcagggacacgctggtgctcaaggtcctcctggccctcctgggattaatggtagtcctggtggtaaaggcgaaatgggtcccgctggcattcctggagctcctggactgatgggagcccggggtcctccaggaccagccggtgctaatggtgctcctggactgcgaggtggtgcaggtgagcctggtaagaatggtgccaaaggagagcccggaccacgtggtgaacgcggtgaggctggtattccaggtgttccaggagctaaaggcgaagatggcaaggatggatcacctggagaacctggtgcaaatgggcttccaggagctgcaggagaaaggggtgcccctgggttccgaggacctgctggaccaaatggcatcccaggagaaaagggtcctgctggagagcgtggtgctccaggccctgcagggcccagaggagctgctggagaacctggcagagatggcgtccctggaggtccaggaatgaggggcatgcccggaagtccaggaggaccaggaagtgatgggaaaccagggcctcccggaagtcaaggagaaagtggtcgaccaggtcctcctgggccatctggtccccgaggtcagcctggtgtcatgggcttccccggtcctaaaggaaatgatggtgctcctggtaagaatggagaacgaggtggccctggaggacctggccctcagggtcctcctggaaagaatggtgaaactggacctcaaggacccccagggcctactgggcctggtggtgacaaaggagacacaggaccccctggtccacaaggattacaaggcttgcctggtacaggtggtcctccaggagaaaatggaaaacctggggaaccaggtccaaagggtgatgccggtgcacctggagctccaggaggcaagggtgatgctggtgcccctggtgaacgtggacctcctggattggcaggggccccaggacttagaggtggagctggtccccctggtcccgaaggaggaaagggtgctgctggtcctcctgggccacctggtgctgctggtactcctggtctgcaaggaatgcctggagaaagaggaggtcttggaagtcctggtccaaagggtgacaagggtgaaccaggcggcccaggtgctgatggtgtcccagggaaagatggcccaaggggtcctactggtcctattggtcctcctggcccagctggccagcctggagataagggtgaaggtggtgcccccggacttccaggtatagctggacctcgtggtagccctggtgagagaggtgaaactggccctccaggacctgctggtttccctggtgctcctggacagaatggtgaacctggtggtaaaggagaaagaggggctccgggtgagaaaggtgaaggaggccctcctggagttgcaggaccccctggaggttctggacctgctggtcctcctggtccccaaggtgtcaaaggtgaacgtggcagtcctggtggacctggtgctgctggcttccctggtgctcgtggtcttcctggtcctcctggtagtaatggtaacccaggacccccaggtcccagcggttctccaggcaaggatgggcccccaggtcctgcgggtaacactggtgctcctggcagccctggagtgtctggaccaaaaggtgatgctggccaaccaggagagaagggatcgcctggtgcccagggcccaccaggagctccaggcccacttgggattgctgggatcactggagcacggggtcttgcaggaccaccaggcatgccaggtcctaggggaagccctggccctcagggtgtcaagggtgaaagtgggaaaccaggagctaacggtctcagtggagaacgtggtccccctggaccccagggtcttcctggtctggctggtacagctggtgaacctggaagagatggaaaccctggatcagatggtcttccaggccgagatggatctcctggtggcaagggtgatcgtggtgaaaatggctctcctggtgcccctggcgctcctggtcatccaggcccacctggtcctgtcggtccagctggaaagagtggtgacagaggagaaagtggccctgctggccctgctggtgctcccggtcctgctggttcccgaggtgctcctggtcctcaaggcccacgtggtgacaaaggtgaaacaggtgaacgtggagctgctggcatcaaaggacatcgaggattccctggtaatccaggtgccccaggttctccaggccctgctggtcagcagggtgcaatcggcagtccaggacctgcaggccccagaggacctgttggacccagtggacctcctggcaaagatggaaccagtggacatccaggtcccattggaccaccagggcctcgaggtaacagaggtgaaagaggatctgagggctccccaggccacccagggcaaccaggccctcctggacctcctggtgcccctggtccttgctgtggtggtgttggagccgctgccattgctgggattggaggtgaaaaagctggcggttttgccccgtattatggagatgaaccaatggatttcaaaatcaacaccgatgagattatgacttcactcaagtctgttaatggacaaatagaaagcctcattagtcctgatggttctcgtaaaaaccccgctagaaactgcagagacctgaaattctgccatcctgaactcaagagtggagaatactgggttgaccctaaccaaggatgcaaattggatgctatcaaggtattctgtaatatggaaactggggaaacatgcataagtgccaatcctttgaatgttccacggaaacactggtggacagattctagtgctgagaagaaacacgtttggtttggagagtccatggatggtggttttcagtttagctacggcaatcctgaacttcctgaagatgtccttgatgtgcagctggcattccttcgacttctctccagccgagcttcccagaacatcacatatcactgcaaaaatagcattgcatacatggatcaggccagtggaaatgtaaagaaggccctgaagctgatggggtcaaatgaaggtgaattcaaggctgaaggaaatagcaaattcacctacacagttctggaggatggttgcacgaaacacactggggaatggagcaaaacagtctttgaatatcgaacacgcaaggctgtgagactacctattgtagatattgcaccctatgacattggtggtcctgatcaagaatttggtgtggacgttggccctgtttgctttttataaaccaaactctatctgaaatcccaacaaaaaaaatttaactccatatgtgttcctcttgttctaatcttgtcaaccagtgcaagtgaccgacaaaattccagttatttatttccaaaatgtttggaaacagtataatttgacaaagaaaaatgatacttctctttttttgctgttccaccaaatacaattcaaatgctttttgttttatttttttaccaattccaatttcaaaatgtctcaatggtgctataataaataaacttcaacactctttatgataacaacactgtgttatattctttgaatcctagcccatctgcagagcaatgactgtgctcaccagtaaaagataacctttctttctgaaatagtcaaatacgaaattagaaaagccctccctattttaactacctcaactggtcagaaacacagattgtattctatgagtcccagaagatgaaaaaaattttatacgttgataaaacttataaatttcattgattaatctcctggaagattggtttaaaaagaaaagtgtaatgcaagaatttaaagaaatatttttaaagccacaattattttaatattggatatcaactgcttgtaaaggtgctcctcttttttcttgtcattgctggtcaagattactaatatttgggaaggctttaaagacgcatgttatggtgctaatgtactttcacttttaaactctagatcagaattgttgacttgcattcagaacataaatgcacaaaatctgtacatgtctcccatcagaaagattcattggcatgccacagggattctcctccttcatcctgtaaaggtcaacaataaaaaccaaattatggggctgcttttgtcacactagcatagagaatgtgttgaaatttaactttgtaagcttgtatgtggttgttgatcttttttttccttacagacacccataataaaatatcatattaaaattc

SEQ ID NO: 153 - DNA, 5921 bp, Homo sapiens
agcagacgggagtttctcctcggggtcggagcaggaggcacgcggagtgtgaggccacgcatgagcggacgctaaccccctccccagccacaaagagtctacatgtctagggtctagacatgttcagctttgtggacctccggctcctgctcctcttagcggccaccgccctcctgacgcacggccaagaggaaggccaagtcgagggccaagacgaagacatcccaccaatcacctgcgtacagaacggcctcaggtaccatgaccgagacgtgtggaaacccgagccctgccggatctgcgtctgcgacaacggcaaggtgttgtgcgatgacgtgatctgtgacgagaccaagaactgccccggcgccgaagtccccgagggcgagtgctgtcccgtctgccccgacggctcagagtcacccaccgaccaagaaaccaccggcgtcgagggacccaagggagacactggcccccgaggcccaaggggacccgcaggcccccctggccgagatggcatccctggacagcctggacttcccggaccccccggaccccccggacctcccggaccccctggcctcggaggaaactttgctccccagctgtcttatggctatgatgagaaatcaaccggaggaatttccgtgcctggccccatgggtccctctggtcctcgtggtctccctggcccccctggtgcacctggtccccaaggcttccaaggtccccctggtgagcctggcgagcctggagcttcaggtcccatgggtccccgaggtcccccaggtccccctggaaagaatggagatgatggggaagctggaaaacctggtcgtcctggtgagcgtgggcctcctgggcctcagggtgctcgaggattgcccggaacagctggcctccctggaatgaagggacacagaggtttcagtggtttggatggtgccaagggagatgctggtcctgctggtcctaagggtgagcctggcagccctggtgaaaatggagctcctggtcagatgggcccccgtggcctgcctggtgagagaggtcgccctggagcccctggccctgctggtgctcgtggaaatgatggtgctactggtgctgccgggccccctggtcccaccggccccgctggtcctcctggcttccctggtgctgttggtgctaagggtgaagctggtccccaagggccccgaggctctgaaggtccccagggtgtgcgtggtgagcctggcccccctggccctgctggtgctgctggccctgctggaaaccctggtgctgatggacagcctggtgctaaaggtgccaatggtgctcctggtattgctggtgctcctggcttccctggtgcccgaggcccctctggaccccagggccccggcggccctcctggtcccaagggtaacagcggtgaacctggtgctcctggcagcaaaggagacactggtgctaagggagagcctggccctgttggtgttcaaggaccccctggccctgctggagaggaaggaaagcgaggagctcgaggtgaacccggacccactggcctgcccggaccccctggcgagcgtggtggacctggtagccgtggtttccctggcgcagatggtgttgctggtcccaagggtcccgctggtgaacgtggttctcctggccccgctggccccaaaggatctcctggtgaagctggtcgtcccggtgaagctggtctgcctggtgccaagggtctgactggaagccctggcagccctggtcctgatggcaaaactggcccccctggtcccgccggtcaagatggtcgccccggacccccaggcccacctggtgcccgtggtcaggctggtgtgatgggattccctggacctaaaggtgctgctggagagcccggcaaggctggagagcgaggtgttcccggaccccctggcgctgtcggtcctgctggcaaagatggagaggctggagctcagggaccccctggccctgctggtcccgctggcgagagaggtgaacaaggccctgctggctcccccggattccagggtctccctggtcctgctggtcctccaggtgaagcaggcaaacctggtgaacagggtgttcctggagaccttggcgcccctggcccctctggagcaagaggcgagagaggtttccctggcgagcgtggtgtgcaaggtccccctggtcctgctggaccccgaggggccaacggtgctcccggcaacgatggtgctaagggtgatgctggtgcccctggagctcccggtagccagggcgcccctggccttcagggaatgcctggtgaacgtggtgcagctggtcttccagggcctaagggtgacagaggtgatgctggtcccaaaggtgctgatggctctcctggcaaagatggcgtccgtggtctgaccggccccattggtcctcctggccctgctggtgcccctggtgacaagggtgaaagtggtcccagcggccctgctggtcccactggagctcgtggtgcccccggagaccgtggtgagcctggtccccccggccctgctggctttgctggcccccctggtgctgacggccaacctggtgctaaaggcgaacctggtgatgctggtgccaaaggcgatgctggtccccctgggcctgccggacccgctggaccccctggccccattggtaatgttggtgctcctggagccaaaggtgctcgcggcagcgctggtccccctggtgctactggtttccctggtgctgctggccgagtcggtcctcctggcccctctggaaatgctggaccccctggccctcctggtcctgctggcaaagaaggcggcaaaggtccccgtggtgagactggccctgctggacgtcctggtgaagttggtccccctggtccccctggccctgctggcgagaaaggatcccctggtgctgatggtcctgctggtgctcctggtactcccgggcctcaaggtattgctggacagcgtggtgtggtcggcctgcctggtcagagaggagagagaggcttccctggtcttcctggcccctctggtgaacctggcaaacaaggtccctctggagcaagtggtgaacgtggtccccccggtcccatgggcccccctggattggctggaccccctggtgaatctggacgtgagggggctcctgctgccgaaggttcccctggacgagacggttctcctggcgccaagggtgaccgtggtgagaccggccccgctggaccccctggtgctcctggtgctcctggtgcccctggccccgttggccctgctggcaagagtggtgatcgtggtgagactggtcctgctggtcccgccggtcccgtcggccccgtcggcgcccgtggccccgccggaccccaaggcccccgtggtgacaagggtgagacaggcgaacagggcgacagaggcataaagggtcaccgtggcttctctggcctccagggtccccctggccctcctggctctcctggtgaacaaggtccctctggagcctctggtcctgctggtccccgaggtccccctggctctgctggtgctcctggcaaagatggactcaacggtctccctggccccattgggccccctggtcctcgcggtcgcactggtgatgctggtcctgttggtccccccggccctcctggacctcctggtccccctggtcctcccagcgctggtttcgacttcagcttcctgccccagccacctcaagagaaggctcacgatggtggccgctactaccgggctgatgatgccaatgtggttcgtgaccgtgacctcgaggtggacaccaccctcaagagcctgagccagcagatcgagaacatccggagcccagagggaagccgcaagaaccccgcccgcacctgccgtgacctcaagatgtgccactctgactggaagagtggagagtactggattgaccccaaccaaggctgcaacctggatgccatcaaagtcttctgcaacatggagactggtgagacctgcgtgtaccccactcagcccagtgtggcccagaagaactggtacatcagcaagaaccccaaggacaagaggcatgtctggttcggcgagagcatgaccgatggattccagttcgagtatggcggccagggctccgaccctgccgatgtggccatccagctgaccttcctgcgcctgatgtccaccgaggcctcccagaacatcacctaccactgcaagaacagcgtggcctacatggaccagcagactggcaacctcaagaaggccctgctcctcaagggctccaacgagatcgagatccgcgccgagggcaacagccgcttcacctacagcgtcactgtcgatggctgcacgagtcacaccggagcctggggcaagacagtgattgaatacaaaaccaccaagtcctcccgcctgcccatcatcgatgtggcccccttggacgttggtgccccagaccaggaattcggcttcgacgttggccctgtctgcttcctgtaaactccctccatcccaacctggctccctcccacccaaccaactttccccccaacccggaaacagacaagcaacccaaactgaacccccccaaaagccaaaaaatgggagacaatttcacatggactttggaaaatatttttttcctttgcattcatctctcaaacttagtttttatctttgaccaaccgaacatgaccaaaaaccaaaagtgcattcaaccttaccaaaaaaaaaaaaaaaaaaaaaagaataaataaataagtttttaaaaaaggaagcttggtccacttgcttgaagacccatgcgggggtaagtccctttctgcccgttgggttatgaaaccccaatgctgccctttctgctcctttctccacaccccccttggcctcccctccactccttcccaaatctgtctccccagaagacacaggaaacaatgtattgtctgcccagcaatcaaaggcaatgctcaaacacccaagtggcccccaccctcagcccgctcctgcccgcccagcacccccaggccctggggacctggggttctcagactgccaaagaagccttgccatctggcgctcccatggctcttgcaacatctccccttcgtttttgagggggtcatgccgggggagccaccagcccctcactgggttcggaggagagtcaggaagggccacgacaaagcagaaacatcggatttggggaacgcgtgtcatcccttgtgccgcaggctgggcgggagagactgttctgttctgttccttgtgtaactgtgttgctgaaagactacctcgttcttgtcttgatgtgtcaccggggcaactgcctgggggcggggatgggggcagggtggaagcggctccccatttttataccaaaggtgctacatctatgtgatgggtggggtggggagggaatcactggtgctatagaaattgagatgcccccccaggccagcaaatgttcctttttgttcaaagtctatttttattccttgatattttttctttctttttttttttttttgtggatggggacttgtgaatttttctaaaggtgctatttaacatgggaggagagcgtgtgcgctccagcccagcccgctgctcactttccaccctctctccacctgcctctggcttctcaggcctctgctctccgacctctctcctctgaaaccctcctccacagctgcagcccatcctcccggctccctcctagtctgtcctgcgtcctctgtccccgggtttcagagacaacttcccaaagcacaaagcagtttttccctaggggtgggaggaagcaaaagactctgtacctattttgtatgtgtataataatttgagatgtttttaattattttgattgctggaataaagcatgtggaaatgacccaaacataa

SEQ ID NO: 154 - DNA, 2565 bp, Homo sapiens
ccgggaaagtgatgtgggtaggacaggcggggcgagccgcaggtgccagaacacagattgtataaaaggctgggggctggtggggagcaggggaagggaatgtgaccaggtctaggtctggagtttcagcttggacactgagccaagcagacaagcaaagcaagccaggacacaccatcctgccccaggcccagcttctctcctgccttccaacgccatggggagcaatctcagcccccaactctgcctgatgccctttatcttgggcctcttgtctggaggtgtgaccaccactccatggtctttggcccagccccagggatcctgctctctggagggggtagagatcaaaggcggctccttccgacttctccaagagggccaggcactggagtacgtgtgtccttctggcttctacccgtaccctgtgcagacacgtacctgcagatctacggggtcctggagcaccctgaagactcaagaccaaaagactgtcaggaaggcagagtgcagagcaatccactgtccaagaccacacgacttcgagaacggggaatactggccccggtctccctactacaatgtgagtgatgagatctctttccactgctatgacggttacactctccggggctctgccaatcgcacctgccaagtgaatggccggtggagtgggcagacagcgatctgtgacaacggagcggggtactgctccaacccgggcatccccattggcacaaggaaggtgggcagccagtaccgccttgaagacagcgtcacctaccactgcagccgggggcttaccctgcgtggctcccagcggcgaacgtgtcaggaaggtggctcttggagcgggacggagccttcctgccaagactccttcatgtacgacacccctcaagaggtggccgaagctttcctgtcttccctgacagagaccatagaaggagtcgatgctgaggatgggcacggcccaggggaacaacagaagcggaagatcgtcctggacccttcaggctccatgaacatctacctggtgctagatggatcagacagcattggggccagcaacttcacaggagccaaaaagtgtctagtcaacttaattgagaaggtggcaagttatggtgtgaagccaagatatggtctagtgacatatgccacataccccaaaatttgggtcaaagtgtctgaagcagacagcagtaatgcagactgggtcacgaagcagctcaatgaaatcaattatgaagaccacaagttgaagtcagggactaacaccaagaaggccctccaggcagtgtacagcatgatgagctggccagatgacgtccctcctgaaggctggaaccgcacccgccatgtcatcatcctcatgactgatggattgcacaacatgggcggggacccaattactgtcattgatgagatccgggacttgctatacattggcaaggatcgcaaaaacccaagggaggattatctggatgtctatgtgtttggggtcgggcctttggtgaaccaagtgaacatcaatgctttggcttccaagaaagacaatgagcaacatgtgttcaaagtcaaggatatggaaaacctggaagatgttttctaccaaatgatcgatgaaagccagtctctgagtctctgtggcatggtttgggaacacaggaagggtaccgattaccacaagcaaccatggcaggccaagatctcagtcattcgcccttcaaagggacacgagagctgtatgggggctgtggtgtctgagtactttgtgctgacagcagcacattgtttcactgtggatgacaaggaacactcaatcaaggtcagcgtaggaggggagaagcgggacctggagatagaagtagtcctatttcaccccaactacaacattaatgggaaaaaagaagcaggaattcctgaattttatgactatgacgttgccctgatcaagctcaagaataagctgaaatatggccagactatcaggcccatttgtctcccctgcaccgagggaacaactcgagctttgaggcttcctccaactaccacttgccagcaacaaaaggaagagctgctccctgcacaggatatcaaagctctgtttgtgtctgaggaggagaaaaagctgactcggaaggaggtctacatcaagaatggggataagaaaggcagctgtgagagagatgctcaatatgccccaggctatgacaaagtcaaggacatctcagaggtggtcacccctcggttcctttgtactggaggagtgagtccctatgctgaccccaatacttgcagaggtgattctggcggccccttgatagttcacaagagaagtcgtttcattcaagttggtgtaatcagctggggagtagtggatgtctgcaaaaaccagaagcggcaaaagcaggtacctgctcacgcccgagactttcacatcaacctctttcaagtgctgccctggctgaaggagaaactccaagatgaggatttgggttttctataaggggtttcctgctggacaggggcgtgggattgaattaaaacagctgcgacaac

SEQ ID NO: 155 - DNA, 5062 bp, Homo sapiens
cactaacgctcttcctagtccccgggccaactcggacagtttgctcatttattgcaacggtcaaggctggcttgtgccagaacggcgcgcgcgcgacgcacgcacacacacggggggaaacttttttaaaaatgaaaggctagaagagctcagcggcggcgcgggccgtgcgcgagggctccggagctgactcgccgaggcaggaaatccctccggtcgcgacgcccggccccgctcggcgcccgcgtgggatggtgcagcgctcgccgccgggcccgagagctgctgcactgaaggccggcgacgatggcagcgcgcccgctgcccgtgtcccccgcccgcgccctcctgctcgccctggccggtgctctgctcgcgccctgcgaggcccgaggggtgagcttatggaaccaaggaagagctgatgaagttgtcagtgcctctgttcggagtggggacctctggatcccagtgaagagcttcgactccaagaatcatccagaagtgctgaatattcgactacaacgggaaagcaaagaactgatcataaatctggaaagaaatgaaggtctcattgccagcagtttcacggaaacccactatctgcaagacggtactgatgtctccctcgctcgaaattacacggtaattctgggtcactgttactaccatggacatgtacggggatattctgattcagcagtcagtctcagcacgtgttctggtctcaggggacttattgtgtttgaaaatgaaagctatgtcttagaaccaatgaaaagtgcaaccaacagatacaaactcttcccagcgaagaagctgaaaagcgtccggggatcatgtggatcacatcacaacacaccaaacctcgctgcaaagaatgtgtttccaccaccctctcagacatgggcaagaaggcataaaagagagaccctcaaggcaactaagtatgtggagctggtgatcgtggcagacaaccgagagtttcagaggcaaggaaaagatctggaaaaagttaagcagcgattaatagagattgctaatcacgttgacaagttttacagaccactgaacattcggatcgtgttggtaggcgtggaagtgtggaatgacatggacaaatgctctgtaagtcaggacccattcaccagcctccatgaatttctggactggaggaagatgaagcttctacctcgcaaatcccatgacaatgcgcagcttgtcagtggggtttatttccaagggaccaccatcggcatggccccaatcatgagcatgtgcacggcagaccagtctgggggaattgtcatggaccattcagacaatccccttggtgcagccgtgaccctggcacatgagctgggccacaatttcgggatgaatcatgacacactggacaggggctgtagctgtcaaatggcggttgagaaaggaggctgcatcatgaacgcttccaccgggtacccatttcccatggtgttcagcagttgcagcaggaaggacttggagaccagcctggagaaaggaatgggggtgtgcctgtttaacctgccggaagtcagggagtctttcgggggccagaagtgtgggaacagatttgtggaagaaggagaggagtgtgactgtggggagccagaggaatgtatgaatcgctgctgcaatgccaccacctgtaccctgaagccggacgctgtgtgcgcacatgggctgtgctgtgaagactgccagctgaagcctgcaggaacagcgtgcagggactccagcaactcctgtgacctcccagagttctgcacaggggccagccctcactgcccagccaacgtgtacctgcacgatgggcactcatgtcaggatgtggacggctactgctacaatggcatctgccagactcacgagcagcagtgtgtcacactctggggaccaggtgctaaacctgcccctgggatctgctttgagagagtcaattctgcaggtgatccttatggcaactgtggcaaagtctcgaagagttcctttgccaaatgcgagatgagagatgctaaatgtggaaaaatccagtgtcaaggaggtgccagccggccagtcattggtaccaatgccgtttccatagaaacaaacatccccctgcagcaaggaggccggattctgtgccgggggacccacgtgtacttgggcgatgacatgccggacccagggcttgtgcttgcaggcacaaagtgtgcagatggaaaaatctgcctgaatcgtcaatgtcaaaatattagtgtctttggggttcacgagtgtgcaatgcagtgccacggcagaggggtgtgcaacaacaggaagaactgccactgcgaggcccactgggcacctcccttctgtgacaagtttggctttggaggaagcacagacagcggccccatccggcaagcagataaccaaggtttaaccataggaattctggtgaccatcctgtgtcttcttgctgccggatttgtggtttatctcaaaaggaagaccttgatacgactgctgtttacaaataagaagaccaccattgaaaaactaaggtgtgtgcgcccttcccggccaccccgtggcttccaaccctgtcaggctcacctcggccaccttggaaaaggcctgatgaggaagccgccagattcctacccaccgaaggacaatcccaggagattgctgcagtgtcagaatgttgacatcagcagacccctcaacggcctgaatgtccctcagccccagtcaactcagcgagtgcttcctcccctccaccgggccccacgtgcacctagcgtccctgccagacccctgccagccaagcctgcacttaggcaggcccaggggacctgtaagccaaacccccctcagaagcctctgcctgcagatcctctggccagaacaactcggctcactcatgccttggccaggaccccaggacaatgggagactgggctccgcctggcacccctcagacctgctccacaatatccacaccaagtgcccagatccacccacaccgcctatattaagtgagaagccgacaccttttttcaacagtgaagacagaagtttgcactatctttcagctccagttggagttttttgtaccaacttttaggattttttttaatgtttaaaacatcattactataagaactttgagctactgccgtcagtgctgtgctgtgctatggtgctctgtctacttgcacaggtacttgtaaattattaatttatgcagaatgttgattacagtgcagtgcgctgtagtaggcatttttaccatcactgagttttccatggcaggaaggcttgttgtgcttttagtattttagtgaacttgaaatatcctgcttgatgggattctggacaggatgtgtttgctttctgatcaaggccttattggaaagcagtcccccaactacccccagctgtgcttatggtaccagatgcagctcaagagatcccaagtagaatctcagttgattttctggattccccatctcaggccagagccaaggggcttcaggtccaggctgtgtttggctttcagggaggccctgtgccccttgacaactggcaggcaggctcccagggacacctgggagaaatctggcttctggccaggaagctttggtgagaacctgggttgcagacaggaatcttaaggtgtagccacaccaggatagagactggaacactagacaagccagaacttgaccctgagctgaccagccgtgagcatgtttggaaggggtctgtagtgtcactcaaggcggtgcttgatagaaatgccaagcacttctttttctcgctgtcctttctagagcactgccaccagtaggttatttagcttgggaaaggtggtgtttctgtaagaaacctactgcccaggcactgcaaaccgccacctccctatactgcttggagctgagcaaatcaccacaaactgtaatacaatgatcctgtattcagacagatgaggactttccatgggaccacaactattttcagatgtgaaccattaaccagatctagtcaatcaagtctgtttactgcaaggttcaacttattaacaattaggcagactctttatgcttgcaaaaactacaaccaatggaatgtgatgttcatgggtatagttcatgtctgctatcattattcgtagatattggacaaagaaccttctctatggggcatcctctttttccaacttggctgcaggaatctttaaaagatgcttttaacagagtctgaacctatttcttaaacacttgcaacctacctgttgagcatcacagaatgtgataaggaaatcaacttgcttatcaacttcctaaatattatgagatgtggcttgggcagcatccccttgaactcttcactcttcaaatgcctgactagggagccatgtttcacaaggtctttaaagtgactaatggcatgagaaatacaaaaatactcagataaggtaaaatgccatgatgcctctgtcttctggactggttttcacattagaagacaattgacaacagttacataattcactctgagtgttttatgagaaagccttcttttggggtcaacagttttcctatgctttgaaacagaaaaatatgtaccaagaatcttggtttgccttccagaaaacaaaactgcatttcactttcccggtgttccccactgtatctaggcaacatagtattcatgactatggataaactaaacacgtgacacaaacacacacaaaagggaacccagctctaatacattccaactcgtatagcatgcatctgtttattctatagttattaagttctttaaaatgtaaagccatgctggaaaataatactgctgagatacatacagaattactgtaactgattacacttggtaattgtactaaagccaaacatatatatactattaaaaaggtttacagaattttatggtgcattacgtgggcattgtctttttagatgcccaaatccttagatctggcatgttagcccttcctccaattataagaggatatgaaccaaaaaaaaaaaaaaaaaaa

SEQ ID NO: 156 - DNA, 2328 bp, Homo sapiens
gccagccgagcggccagccagtgcggggctggccatgtaaggcccacaggcggtcctgcccgcccggtgccctgcggagagcctcgtgcagccctgggcaccgcccctgccctgccctgaccccttggccttgaaatgctgtcatcggaggagccgtcccgctcgggacaaggccagcatggacaaagctagagctggggcaagcaaggagccttcctgtcctcgaggccgtgggaagagaagcacgcccagggggccactcctgagagcctctctgtccaccaggcctctgcagaggggtcaccatggctctggcccgaggcagccggcagctgggggccctggtgtggggcgcctgcctgtgcgtgctggtgcacgggcagcaggcgcagcccgggcagggctcggaccccgcccgctggcggcagctgatccagtgggagaacaacgggcaggtgtacagcttgctcaactcgggctcagagtacgtgccggccggacctcagcgctccgagagtagctcccgggtgctgctggccggcgcgccccaggcccagcagcggcgcagccacgggagcccccggcgtcggcaggcgccgtccctgcccctgccggggcgcgtgggctcggacaccgtgcgcggccaggcgcggcacccattcggctttggccaggtgcccgacaactggcgcgaggtggccgtcggggacagcacgggcatggccctggcccgcacctccgtctcccagcaacggcacgggggctccgcctcctcggtctcggcttcggccttcgccagcacctaccgccagcagccctcctacccgcagcagttcccctacccgcaggcgcccttcgtcagccagtacgagaactacgaccccgcgtcgcggacctacgaccagggtttcgtgtactaccggcccgcgggcggcggcgtgggcgcgggggcggcggccgtggcctcggcgggggtcatctacccctaccagccccgggcgcgctacgaggagtacggcggcggcgaagagctgcccgagtacccgcctcagggcttctacccggcccccgagaggccctacgtgccgccgccgccgccgccccccgacggcctggaccgccgctactcgcacagtctgtacagcgagggcacccccggcttcgagcaggcctaccctgaccccggtcccgaggcggcgcaggcccatggcggagacccacgcctgggctggtacccgccctacgccaacccgccgcccgaggcgtacgggccgccgcgcgcgctggagccgccctacctgccggtgcgcagctccgacacgcccccgccgggtggggagcggaacggcgcgcagcagggccgcctcagcgtaggcagcgtgtaccggcccaaccagaacggccgcggtctccctgacttggtcccagaccccaactatgtgcaagcatccacttatgtgcagagagcccacctgtactccctgcgctgtgctgcggaggagaagtgtctggccagcacagcctatgcccctgaggccaccgactacgatgtgcgggtgctactgcgcttcccccagcgcgtgaagaaccagggcacagcagacttcctccccaaccggccacggcacacctgggagtggcacagctgccaccagcattaccacagcatggacgagttcagccactacgacctactggatgcagccacaggcaagaaggtggccgagggccacaaggccagtttctgcctggaggacagcacctgtgacttcggcaacctcaagcgctatgcatgcacctctcatacccagggcctgagcccaggctgctatgacacctacaatgcggacatcgactgccagtggatcgacataaccgacgtgcagcctgggaactacatcctcaaggtgcacgtgaacccaaagtatattgttttggagtctgacttcaccaacaacgtggtgagatgcaacattcactacacaggtcgctacgtttctgcaacaaactgcaaaattgtccaatcctgatctccgggagggacagatggccaatctctccccttccaaagcaggccctgctccccgggcagcctcccgccgaggggcccagcccccaacccacaggcagggaggggcatccctccctgccggcctcagggagcgaacgtggatgaaaaccacagggattccggatgccagaccccattttatacttcacttttctctacagtgttgttttgttgttgttggtttttattttttatactttggccataccacagagctagattgcccaggtctgggctgaataaaacaaggtttttct

SEQ ID NO: 157 - DNA, 2249 bp, Homo sapiens
ctcctctacaaagaggtggacagagaagacagcagagaccatgggacccccctcagcccctccctgcagattgcatgtcccctggaaggaggtcctgctcacagcctcacttctaaccttctggaacccacccaccactgccaagctcactattgaatccacgccattcaatgtcgcagaggggaaggaggttcttctactcgcccacaacctgccccagaatcgtattggttacagctggtacaaaggcgaaagagtggatggcaacagtctaattgtaggatatgtaataggaactcaacaagctaccccagggcccgcatacagtggtcgagagacaatataccccaatgcatccctgctgatccagaacgtcacccagaatgacacaggattctataccctacaagtcataaagtcagatcttgtgaatgaagaagcaaccggacagttccatgtatacccggagctgcccaagccctccatctccagcaacaactccaaccccgtggaggacaaggatgctgtggccttcacctgtgaacctgaggttcagaacacaacctacctgtggtgggtaaatggtcagagcctcccggtcagtcccaggctgcagctgtccaatggcaacatgaccctcactctactcagcgtcaaaaggaacgatgcaggatcctatgaatgtgaaatacagaacccagcgagtgccaaccgcagtgacccagtcaccctgaatgtcctctatggcccagatgtccccaccatttccccctcaaaggccaattaccgtccaggggaaaatctgaacctctcctgccacgcagcctctaacccacctgcacagtactcttggtttatcaatgggacgttccagcaatccacacaagagctctttatccccaacatcactgtgaataatagcggatcctatatgtgccaagcccataactcagccactggcctcaataggaccacagtcacgatgatcacagtctctggaagtgctcctgtcctctcagctgtggccaccgtcggcatcacgattggagtgctggccagggtggctctgatatagcagccctggtgtattttcgatatttcaggaagactggcagattggaccagaccctgaattcttctagctcctccaatcccattttatcccatggaaccactaaaaacaaggtctgctctgctcctgaagccctatatgctggagatggacaactcaatgaaaatttaaagggaaaaccctcaggcctgaggtgtgtgccactcagagacttcacctaactagagacagtcaaactgcaaaccatggtgagaaattgacgacttcacactatggacagcttttcccaagatgtcaaaacaagactcctcatcatgataaggctcttacccccttttaatttgtccttgcttatgcctgcctctttcgcttggcaggatgatgctgtcattagtatttcacaagaagtagcttcagagggtaacttaacagagtgtcagatctatcttgtcaatcccaacgttttacataaaataagagatcctttagtgcacccagtgactgacattagcagcatctttaacacagccgtgtgttcaaatgtacagtggtccttttcagagttggacttctagactcacctgttctcactccctgttttaattcaacccagccatgcaatgccaaataatagaattgctccctaccagctgaacagggaggagtctgtgcagtttctgacacttgttgttgaacatggctaaatacaatgggtatcgctgagactaagttgtagaaattaacaaatgtgctgcttggttaaaatggctacactcatctgactcattctttattctattttagttggtttgtatcttgcctaaggtgcgtagtccaactcttggtattaccctcctaatagtcatactagtagtcatactccctggtgtagtgtattctctaaaagctttaaatgtctgcatgcagccagccatcaaatagtgaatggtctctctttggctggaattacaaaactcagagaaatgtgtcatcaggagaacatcataacccatgaaggataaaagccccaaatggtggtaactgataatagcactaatgctttaagatttggtcacactctcacctaggtgagcgcattgagccagtggtgctaaatgctacatactccaactgaaatgttaaggaagaagatagatccaaaaaaaaaaaaaaaaaa

SEQ ID NO: 158 - DNA, 2260 bp, Homo sapiens
aagcccagcagccccggggcggatggctccggccgcctggctccgcagcgcggccgcgcgcgccctcctgcccccgatgctgctgctgctgctccagccgccgccgctgctggcccgggctctgccgccggacgtccaccacctccatgccgagaggagggggccacagccctggcatgcagccctgcccagtagcccggcacctgcccctgccacgcaggaagccccccggcctgccagcagcctcaggcctccccgctgtggcgtgcccgacccatctgatgggctgagtgcccgcaaccgacagaagaggttcgtgctttctggcgggcgctgggagaagacggacctcacctacaggatccttcggttcccatggcagttggtgcaggagcaggtgcggcagacgatggcagaggccctaaaggtatggagcgatgtgacgccactcacctttactgaggtgcacgagggccgtgctgacatcatgatcgacttcgccaggtactggcatggggacgacctgccgtttgatgggcctgggggcatcctggcccatgccttcttccccaagactcaccgagaaggggatgtccacttcgactatgatgagacctggactatcggggatgaccagggcacagacctgctgcaggtggcagcccatgaatttggccacgtgctggggctgcagcacacaacagcagccaaggccctgatgtccgccttctacacctttcgctacccactgagtctcagcccagatgactgcaggggcgttcaacacctatatggccagccctggcccactgtcacctccaggaccccagccctgggcccccaggctgggatagacaccaatgagattgcaccgctggagccagacgccccgccagatgcctgtgaggcctcctttgacgcggtctccaccatccgaggcgagctctttttcttcaaagcgggctttgtgtggcgcctccgtgggggccagctgcagcccggctacccagcattggcctctcgccactggcagggactgcccagccctgtggacgctgccttcgaggatgcccagggccacatttggttcttccaaggtgctcagtactgggtgtacgacggtgaaaagccagtcctgggccccgcacccctcaccgagctgggcctggtgaggttcccggtccatgctgccttggtctggggtcccgagaagaacaagatctacttcttccgaggcagggactactggcgtttccaccccagcacccggcgtgtagacagtcccgtgccccgcagggccactgactggagaggggtgccctctgagatcgacgctgccttccaggatgctgatggctatgcctacttcctgcgcggccgcctctactggaagtttgaccctgtgaaggtgaaggctctggaaggcttcccccgtctcgtgggtcctgacttctttggctgtgccgagcctgccaacactttcctctgaccatggcttggatgccctcaggggtgctgacccctgccaggccacgaatatcaggctagagacccatggccatctttgtggctgtgggcaccaggcatgggactgagcccatgtctcctgcagggggatggggtggggtacaaccaccatgacaactgccgggagggccacgcaggtcgtggtcacctgccagcgactgtctcagactgggcagggaggctttggcatgacttaagaggaagggcagtcttgggacccgctatgcaggtcctggcaaacctggctgccctgtctcatccctgtccctcagggtagcaccatggcaggactgggggaactggagtgtccttgctgtatccctgttgtgaggttccttccaggggctggcactgaagcaagggtgctggggccccatggccttcagccctggctgagcaactgggctgtagggcagggccacttcctgaggtcaggtcttggtaggtgcctgcatctgtctgccttctggctgacaatcctggaaatctgttctccagaatccaggccaaaaagttcacagtcaaatggggaggggtattcttcatgcaggagaccccaggccctggaggctgcaacatacctcaatcctgtcccaggccggatcctcctgaagcccttttcgcagcactgctatcctccaaagccattgtaaatgtgtgtacagtgtgtataaaccttcttcttcttttttttttttaaactgaggattgtcattaaacacagttgttttct

SEQ ID NO: 159 - DNA, 1973 bp, Homo sapiens
gggatattggagtagcaagaggctgggaagccatcacttaccttgcactgagaaagaagacaaaggccagtatgcacagctttcctccactgctgctgctgctgttctggggtgtggtgtctcacagcttcccagcgactctagaaacacaagagcaagatgtggacttagtccagaaatacctggaaaaatactacaacctgaagaatgatgggaggcaagttgaaaagcggagaaatagtggcccagtggttgaaaaattgaagcaaatgcaggaattctttgggctgaaagtgactgggaaaccagatgctgaaaccctgaaggtgatgaagcagcccagatgtggagtgcctgatgtggctcagtttgtcctcactgaggggaaccctcgctgggagcaaacacatctgacctacaggattgaaaattacacgccagatttgccaagagcagatgtggaccatgccattgagaaagccttccaactctggagtaatgtcacacctctgacattcaccaaggtctctgagggtcaagcagacatcatgatatcttttgtcaggggagatcatcgggacaactctccttttgatggacctggaggaaatcttgctcatgcttttcaaccaggcccaggtattggaggggatgctcattttgatgaagatgaaaggtggaccaacaatttcagagagtacaacttacatcgtgttgcggctcatgaactcggccattctcttggactctcccattctactgatatcggggctttgatgtaccctagctacaccttcagtggtgatgttcagctagctcaggatgacattgatggcatccaagccatatatggacgttcccaaaatcctgtccagcccatcggcccacaaaccccaaaagcgtgtgacagtaagctaacctttgatgctataactacgattcggggagaagtgatgttctttaaagacagattctacatgcgcacaaatcccttctacccggaagttgagctcaatttcatttctgttttctggccacaactgccaaatgggcttgaagctgcttacgaatttgccgacagagatgaagtccggtttttcaaagggaataagtactgggctgttcagggacagaatgtgctacacggataccccaaggacatctacagctcctttggcttccctagaactgtgaagcatatcgatgctgctctttctgaggaaaacactggaaaaacctacttctttgttgctaacaaatactggaggtatgatgaatataaacgatctatggatccaggttatcccaaaatgatagcacatgactttcctggaattggccacaaagttgatgcagttttcatgaaagatggatttttctatttctttcatggaacaagacaatacaaatttgatcctaaaacgaagagaattttgactctccagaaagctaatagctggttcaactgcaggaaaaattgaacattactaatttgaatggaaaacacatggtgtgagtccaaagaaggtgttttcctgaagaactgtctattttctcagtcatttttaacctctagagtcactgatacacagaatataatcttatttatacctcagtttgcatatttttttactatttagaatgtagccctttttgtactgatataatttagttccacaaatggtgggtacaaaaagtcaagtttgtggcttatggattcatataggccagagttgcaaagatcttttccagagtatgcaactctgacgttgatcccagagagcagcttcagtgacaaacatatcctttcaagacagaaagagacaggagacatgagtctttgccggaggaaaagcagctcaagaacacatgtgcagtcactggtgtcaccctggataggcaagggataactcttctaacacaaaataagtgttttatgtttggaataaagtcaaccttgtttctactgtttt

SEQ ID NO: 160 - DNA, 2722 bp, Homo sapiens
caacagtccccaggcatcaccattcaagatgcatccaggggtcctggctgccttcctcttcttgagctggactcattgtcgggccctgccccttcccagtggtggtgatgaagatgatttgtctgaggaagacctccagtttgcagagcgctacctgagatcatactaccatcctacaaatctcgcgggaatcctgaaggagaatgcagcaagctccatgactgagaggctccgagaaatgcagtctttcttcggcttagaggtgactggcaaacttgacgataacaccttagatgtcatgaaaaagccaagatgcggggttcctgatgtgggtgaatacaatgttttccctcgaactcttaaatggtccaaaatgaatttaacctacagaattgtgaattacacccctgatatgactcattctgaagtcgaaaaggcattcaaaaaagccttcaaagtttggtccgatgtaactcctctgaattttaccagacttcacgatggcattgctgacatcatgatctcttttggaattaaggagcatggcgacttctacccatttgatgggccctctggcctgctggctcatgcttttcctcctgggccaaattatggaggagatgcccattttgatgatgatgaaacctggacaagtagttccaaaggctacaacttgtttcttgttgctgcgcatgagttcggccactccttaggtcttgaccactccaaggaccctggagcactcatgtttcctatctacacctacaccggcaaaagccactttatgcttcctgatgacgatgtacaagggatccagtctctctatggtccaggagatgaagaccccaaccctaaacatccaaaaacgccagacaaatgtgacccttccttatcccttgatgccattaccagtctccgaggagaaacaatgatctttaaagacagattcttctggcgcctgcatcctcagcaggttgatgcggagctgtttttaacgaaatcattttggccagaacttcccaaccgtattgatgctgcatatgagcacccttctcatgacctcatcttcatcttcagaggtagaaaattttgggctcttaatggttatgacattctggaaggttatcccaaaaaaatatctgaactgggtcttccaaaagaagttaagaagataagtgcagctgttcactttgaggatacaggcaagactctcctgttctcaggaaaccaggtctggagatatgatgatactaaccatattatggataaagactatccgagactaatagaagaagacttcccaggaattggtgataaagtagatgctgtctatgagaaaaatggttatatctattttttcaacggacccatacagtttgaatacagcatctggagtaaccgtattgttcgcgtcatgccagcaaattccattttgtggtgttaagtgtctttttaaaaattgttatttaaatcctgaagagcatttggggtaatacttccagaagtgcggggtaggggaagaagagctatcaggagaaagcttggttctgtgaacaagcttcagtaagttatctttgaatatgtagtatctatatgactatgcgtggctggaaccacattgaagaatgttagagtaatgaaatggaggatctctaaagagcatctgattcttgttgctgtacaaaagcaatggttgatgatacttcccacaccacaaatgggacacatggtctgtcaatgagagcataatttaaaaatatatttataaggaaattttacaagggcataaagtaaatacatgcatataatgaataaatcattcttactaaaaagtataaaatagtatgaaaatggaaatttgggagagccatacataaaagaaataaaccaaaggaaaatgtctgtaataatagactgtaacttccaaataaataattttcattttgcactgaggatattcagatgtatgtgcccttcttcacacagacactaacgaaatatcaaagtcattaaagacaggagacaaaagagcagtggtaagaatagtagatgtggcctttgaattctgtttaattttcacttttggcaatgactcaaagtctgctctcatataagacaaatattcctttgcatattataaaggataaagaaggatgatgtctttttattaaaatatttcaggttcttcagaagtcacacattacaaagttaaaattgttatcaaaatagtctaaggccatggcatccctttttcataaattatttgattatttaagactaaaagttgcattttaaccctattttacctagctaattatttaattgtccggtttgtcttggatatataggctattttctaaagacttgtatagcatgaaataaaatatatcttataaagtggaagtatgtatattaaaaaagagacatccaaatttttttttaaagcagtctactagattgtgatcccttgagatatggaaggatgcctttttttctctgcatttaaaaaaatcccccagcacttcccacagtgcctattgatacttggggagggtgcttggcacttattgaatatatgatcggccatcaagggaagaactattgtgctcagagacactgttgataaaaactcaggcaaagaaaatgaaatgcatatttgcaaagtgtattaggaagtgtttatgttgtttataataaaaatatattttcaacagaaaaaaaa

SEQ ID NO: 161 - DNA, 2208 bp, Homo sapiens
tctttggctttttttggcggagctggggcgccctccggaagcgtttccaactttccagaagtttctcgggacgggcaggagggggtggggactgccatatatagatcccgggagcaggggagcgggctaagagtagaatcgtgtcgcggctcgagagcgagagtcacgtcccggcgctagcccagcccgacccaggcccaccgtggtgcacgcaaaccacttcctggccatgcgctccctcctgcttctcagcgccttctgcctcctggaggcggccctggccgccgaggtgaagaaacctgcagccgcagcagctcctggcactgcggagaagttgagccccaaggcggccacgcttgccgagcgcagcgccggcctggccttcagcttgtaccaggccatggccaaggaccaggcagtggagaacatcctggtgtcacccgtggtggtggcctcgtcgctagggctcgtgtcgctgggcggcaaggcgaccacggcgtcgcaggccaaggcagtgctgagcgccgagcagctgcgcgacgaggaggtgcacgccggcctgggcgagctgctgcgctcactcagcaactccacggcgcgcaacgtgacctggaagctgggcagccgactgtacggacccagctcagtgagcttcgctgatgacttcgtgcgcagcagcaagcagcactacaactgcgagcactccaagatcaacttccgcgacaagcgcagcgcgctgcagtccatcaacgagtgggccgcgcagaccaccgacggcaagctgcccgaggtcaccaaggacgtggagcgcacggacggcgccctgctagtcaacgccatgttcttcaagccacactgggatgagaaattccaccacaagatggtggacaaccgtggcttcatggtgactcggtcctataccgtgggtgtcatgatgatgcaccggacaggcctctacaactactacgacgacgagaaggaaaagctgcaaatcgtggagatgcccctggcccacaagctctccagcctcatcatcctcatgccccatcacgtggagcctctcgagcgccttgaaaagctgctaaccaaagagcagctgaagatctggatggggaagatgcagaagaaggctgttgccatctccttgcccaagggtgtggtggaggtgacccatgacctgcagaaacacctggctgggctgggcctgactgaggccattgacaagaacaaggccgacttgtcacgcatgtcaggcaagaaggacctgtacctggccagcgtgttccacgccaccgcctttgagttggacacagatggcaacccctttgaccaggacatctacgggcgcgaggagctgcgcagccccaagctgttctacgccgaccaccccttcatcttcctagtgcgggacacccaaagcggctccctgctattcattgggcgcctggtccggcctaagggtgacaagatgcgagacgagttatagggcctcagggtgcacacaggatggcaggaggcatccaaaggctcctgagacacatgggtgctattggggttgggggggaggtgaggtaccagccttggatactccatggggtgggggtggaaaaacagaccggggttcccgtgtgcctgagcggaccttcccagctagaattcactccacttggacatgggccccagataccatgatgctgagcccggaaactccacatcctgtgggacctgggccatagtcattctgcctgccctgaaagtcccagatcaagcctgcctcaatcagtattcatatttatagccaggtaccttctcacctgtgagaccaaattgagctaggggggtcagccagccctcttctgacactaaaacacctcagctgcctccccagctctatcccaacctctcccaactataaaactaggtgctgcagcccctgggaccaggcacccccagaatgacctggccgcagtgaggcggattgagaaggagctcccaggaggggcttctgggcagactctggtcaagaagcatcgtgtctggcgttgtggggatgaactttttgttttgtttcttccttttttagttcttcaaagatagggagggaagggggaacatgagcctttgttgctatcaatccaagaacttatttgtacattttttttttcaataaaacttttccaatgacattttgttggagcgtggaaaaaa

SEQ ID NO: 162 - DNA, 2373 bp, Homo sapiens
cccaggcccaccccacccagcacccctggcgcagggactgctggaacctggctgtgcgcgctgtcgctttaagacagactctgccggcgccgtccggagccttagaaaccggccccggatcgcgagccggagccggagccggagccggggccggccgggctgctgaggcccgagcggcaggagcgcagcgcggagcgctgagccaggcgcccagtcgcgagaagctgccgccgcctctgcccgcccggcgccgcagccccgggcggtccatggggcgggcacggcgtcgctgcaggcgccggcagccctggagggcagccgcttaggcgctgcgctcttgtccccgcaggtcgcagccagggcggcggggcgcgcccagccccggcccctggagcgcccgccgcggtccccacctccatggacgccttcaaggggggcatgagcctggagcggctgccggaggggctccggccgccgccgccgccaccccatgacatggggcccgccttccacctggcccggcccgccgacccccgcgagccgctcgagaactccgccagcgagtcgtctgacacggagctgccagagaaggagcgcggcggggaacccaaggggcccgaggacagtggtgcgggaggcacgggctgcggcggcgcagacgacccagccaagaagaagaagcagcggcggcaacgtacgcacttcacaagccagcagttgcaagagctagaggccacgttccagaggaaccgctaccccgacatgagcatgagggaggagatcgccgtgtggaccaacctcaccgagccgcgcgtgcgggtctggttcaagaaccggcgagccaagtggcgtaagcgcgagcgtaaccagcagctggacctgtgcaagggtggctacgtgccgcagttcagcggcctagtgcagccctacgaggacgtgtacgccgccggctactcctacaacaactgggccgccaagagcctggcgccagcgccgctctccaccaagagcttcaccttcttcaactccatgagcccgctgtcgtcgcagtccatgttctcagcacccagctccatctcctccatgaccatgccgtccagcatgggcccaggcgccgtgcctggcatgcccaactcgggcctcaacaacatcaacaacctcaccggctcctcgctcaactcggccatgtcgccgggcgcttgcccgtacggcactcccgcctcgccctacagcgtctaccgggacacgtgcaactcgagcctagccagcctgcggctcaagtccaaacagcactcgtcgtttggctacggcgccctgcagggcccggcctcgggcctcaacgcgtgccagtacaacagctgaccgccccgccgcaccacgcgggccggcggccggagcggggaagggcgcgggcgcggaggacgcacgcggggccccggctcgcaagccccagctcaccgcgccgcggacctcacacctgcgcagccccctcctcccacttcccactccgggttggttttgtgtttgcttttccggaccccactctgccctccaaaaagacaaaaaaaaaaaaaaaaaaaaaagcaaaaagacgtcggagaaaagtgccgcgaaaaaatggatgagttgcaatttctctcgggatggcgcgggtggtgtgtgtgtgttcccacgggccccggaggcccactccgcggagggcacgcggcgcggtaggcgagcgccgaggcccagcggccgggggaggacgacctcgtatcccgcgtccccgccgcgctggatccggactgagtggccgggcctgcggactggatgtgcggggcctggacttgcctaggatttcccgaccccgtacaaaccaagttgccctctccgagctaggcccggccgagagcgccttagctcgagtcggatccgtgttggggcgggcgttgggtttggggggacggtgcccccagcccaggatcgggcactcagtggagccgcacacggccccggcgcgcctggtagagcctcgctggccccgcgccccggagccctatattaaggccacggagcgacagcgggcagtgcgggcctggcgggaggtgggggaggtccatctcagaacaccccagccttgagcttagctgcaggcccaggccctctgctctgctcccgggctaggaggtggccctctgtctgggcgaacagccccctcctcaccgcccgccgtgcaagagtcgagccggcagagcaaggggcgcggccccagggccctgcgcccactttgcacacccgctctccggcccgcgcccctgtttacagcgtccctgtgtatgttggactgactgtaataaatctgtctatatcgactaaaaaaaaaaaaaaaaa

SEQ ID NO: 163 - DNA, 9645 bp, Homo sapiens
atgcccaagcgcgcgcactggggggccctctccgtggtgctgatcctgctttggggccatccgcgagtggcgctggcctgcccgcatccttgtgcctgctacgtccccagcgaggtccactgcacgttccgatccctggcttccgtgcccgctggcattgctagacacgtggaaagaatcaatttggggtttaatagcatacaggccctgtcagaaacctcatttgcaggactgaccaagttggagctacttatgattcacggcaatgagatcccaagcatccccgatggagctttaagagacctcagctctcttcaggttttcaagttcagctacaacaagctgagagtgatcacaggacagaccctccagggtctctctaacttaatgaggctgcacattgaccacaacaagatcgagtttatccaccctcaagctttcaacggcttaacgtctctgaggctactccatttggaaggaaatctcctccaccagctgcaccccagcaccttctccacgttcacatttttggattatttcagactctccaccataaggcacctctacttagcagagaacatggttagaactcttcctgccagcatgcttcggaacatgccgcttctggagaatctttacttgcagggaaatccgtggacctgcgattgtgagatgagatggtttttggaatgggatgcaaaatccagaggaattctgaagtgtaaaaaggacaaagcttatgaaggcggtcagttgtgtgcaatgtgcttcagtccaaagaagttgtacaaacatgagatacacaagctgaaggacatgacttgtctgaagccttcaatagagtcccctctgagacagaacaggagcaggagtattgaggaggagcaagaacaggaagaggatggtggcagccagctcatcctggagaaattccaactgccccagtggagcatctctttgaatatgaccgacgagcacgggaacatggtgaacttggtctgtgacatcaagaaaccaatggatgtgtacaagattcacttgaaccaaacggatcctccagatattgacataaatgcaacagttgccttggactttgagtgtccaatgacccgagaaaactatgaaaagctatggaaattgatagcatactacagtgaagttcccgtgaagctacacagagagctcatgctcagcaaagaccccagagtcagctaccagtacaggcaggatgctgatgaggaagctctttactacacaggtgtgagagcccagattcttgcagaaccagaatgggtcatgcagccatccatagatatccagctgaaccgacgtcagagtacggccaagaaggtgctactttcctactacacccagtattctcaaacaatatccaccaaagatacaaggcaggctcggggcagaagctgggtaatgattgagcctagtggagctgtgcaaagagatcagactgtcctggaagggggtccatgccagttgagctgcaacgtgaaagcttctgagagtccatctatcttctgggtgcttccagatggctccatcctgaaagcgcccatggatgacccagacagcaagttctccattctcagcagtggctggctgaggatcaagtccatggagccatctgactcaggcttgtaccagtgcattgctcaagtgagggatgaaatggaccgcatggtatatagggtacttgtgcagtctccctccactcagccagccgagaaagacacagtgacaattggcaagaacccaggggagtcggtgacattgccttgcaatgctttagcaatacccgaagcccaccttagctggattcttccaaacagaaggataattaatgatttggctaacacatcacatgtatacatgttgccaaatggaactctttccatcccaaaggtccaagtcagtgatagtggttactacagatgtgtggctgtcaaccagcaaggggcagaccattttacggtgggaatcacagtgaccaagaaagggtctggcttgccatccaaaagaggcagacgcccaggtgcaaaggctctttccagagtcagagaagacatcgtggaggatgaagggggctcgggcatgggagatgaagagaacacttcaaggagacttctgcatccaaaggaccaagaggtgttcctcaaaacaaaggatgatgccatcaatggagacaagaaagccaagaaagggagaagaaagctgaaactctggaagcattcggaaaaagaaccagagaccaatgttgcagaaggtcgcagagtgtttgaatctagacgaaggataaacatggcaaacaaacagattaatccggagcgctgggctgatattttagccaaagtccgtgggaaaaatctccctaagggcacagaagtacccccgttgattaaaaccacaagtcctccatccttgagcctagaagtcacaccaccttttcctgctgtttctcccccctcagcatctcctgtgcagacagtaaccagtgctgaagaatcctcagcagatgtacctctacttggtgaagaagagcacgttttgggtaccatttcctcagccagcatggggctagaacacaaccacaatggagttattcttgttgaacctgaagtaacaagcacacctctggaggaagttgttgatgacctttctgagaagactgaggagataacttccactgaaggagacctgaaggggacagcagcccctacacttatatctgagccttatgaaccatctcctactctgcacacattagacacagtctatgaaaagcccacccatgaagagacggcaacagagggttggtctgcagcagatgttggatcgtcaccagagcccacatccagtgagtatgagcctccattggatgctgtctccttggctgagtctgagcccatgcaatactttgacccagatttggagactaagtcacaaccagatgaggataagatgaaagaagacacctttgcacaccttactccaacccccaccatctgggttaatgactccagtacatcacagttatttgaggattctactataggggaaccaggtgtcccaggccaatcacatctacaaggactgacagacaacatccaccttgtgaaaagtagtctaagcactcaagacaccttactgattaaaaagggtatgaaagagatgtctcagacactacagggaggaaatatgctagagggagaccccacacactccagaagttctgagagtgagggccaagagagcaaatccatcactttgcctgactccacactgggtataatgagcagtatgtctccagttaagaagcctgcggaaaccacagttggtaccctcctagacaaagacaccacaacagtaacaacaacaccaaggcaaaaagttgctccgtcatccaccatgagcactcacccttctcgaaggagacccaacgggagaaggagattacgccccaacaaattccgccaccggcacaagcaaaccccacccacaacttttgccccatcagagactttttctactcaaccaactcaagcacctgacattaagatttcaagtcaagtggagagttctctggttcctacagcttgggtggataacacagttaatacccccaaacagttggaaatggagaagaatgcagaacccacatccaagggaacaccacggagaaaacacgggaagaggccaaacaaacatcgatataccccttctacagtgagctcaagagcgtccggatccaagcccagcccttctccagaaaataaacatagaaacattgttactcccagttcagaaactatacttttgcctagaactgtttctctgaaaactgagggcccttatgattccttagattacatgacaaccaccagaaaaatatattcatcttaccctaaagtccaagagacacttccagtcacatataaacccacatcagatggaaaagaaattaaggatgatgttgccacaaatgttgacaaacataaaagtgacattttagtcactggtgaatcaattactaatgccataccaacttctcgctccttggtctccactatgggagaatttaaggaagaatcctctcctgtaggctttccaggaactccaacctggaatccctcaaggacggcccagcctgggaggctacagacagacatacctgttaccacttctggggaaaatcttacagaccctccccttcttaaagagcttgaggatgtggatttcacttccgagtttttgtcctctttgacagtctccacaccatttcaccaggaagaagctggttcttccacaactctctcaagcataaaagtggaggtggcttcaagtcaggcagaaaccaccacccttgatcaagatcatcttgaaaccactgtggctattctcctttctgaaactagaccacagaatcacacccctactgctgcccggatgaaggagccagcatcctcgtccccatccacaattctcatgtctttgggacaaaccaccaccactaagccagcacttcccagtccaagaatatctcaagcatctagagattccaaggaaaatgttttcttgaattatgtggggaatccagaaacagaagcaaccccagtcaacaatgaaggaacacagcatatgtcagggccaaatgaattatcaacaccctcttccgaccgggatgcatttaacttgtctacaaagctggaattggaaaagcaagtatttggtagtaggagtctaccacgtggcccagatagccaacgccaggatggaagagttcatgcttctcatcaactaaccagagtccctgccaaacccatcctaccaacagcaacagtgaggctacctgaaatgtccacacaaagcgcttccagatactttgtaacttcccagtcacctcgtcactggaccaacaaaccggaaataactacatatccttctggggctttgccagagaacaaacagtttacaactccaagattatcaagtacaacaattcctctcccattgcacatgtccaaacccagcattcctagtaagtttactgaccgaagaactgaccaattcaatggttactccaaagtgtttggaaataacaacatccctgaggcaagaaacccagttggaaagcctcccagtccaagaattcctcattattccaatggaagactccctttctttaccaacaagactctttcttttccacagttgggagtcacccggagaccccagatacccacttctcctgccccagtaatgagagagagaaaagttattccaggttcctacaacaggatacattcccatagcaccttccatctggactttggccctccggcacctccgttgttgcacactccgcagaccacgggatcaccctcaactaacttacagaatatccctatggtctcttccacccagagttctatctcctttataacatcttctgtccagtcctcaggaagcttccaccagagcagctcaaagttctttgcaggaggacctcctgcatccaaattctggtctcttggggaaaagccccaaatcctcaccaagtccccacagactgtgtccgtcaccgctgagacagacactgtgttcccctgtgaggcaacaggaaaaccaaagcctttcgttacttggacaaaggtttccacaggagctcttatgactccgaataccaggatacaacggtttgaggttctcaagaacggtaccttagtgatacggaaggttcaagtacaagatcgaggccagtatatgtgcaccgccagcaacctgcacggcctggacaggatggtggtcttgctttcggtcaccgtgcagcaacctcaaatcctagcctcccactaccaggacgtcactgtctacctgggagacaccattgcaatggagtgtctggccaaagggaccccagccccccaaatttcctggatcttccctgacaggagggtgtggcaaactgtgtcccccgtggagagccgcatcaccctgcacgaaaaccggaccctttccatcaaggaggcgtccttctcagacagaggcgtctataagtgcgtggccagcaatgcagccggggcggacagcctggccatccgcctgcacgtggcggcactgccccccgttatccaccaggagaagctggagaacatctcgctgcccccggggctcagcattcacattcactgcactgccaaggctgcgcccctgcccagcgtgcgctgggtgctcggggacggtacccagatccgcccctcgcagttcctccacgggaacttgtttgttttccccaacgggacgctctacatccgcaacctcgcgcccaaggacagcgggcgctatgagtgcgtggccgccaacctggtaggctccgcgcgcaggacggtgcagctgaacgtgcagcgtgcagcagccaacgcgcgcatcacgggcacctccccgcggaggacggacgtcaggtacggaggaaccctcaagctggactgcagcgcctcgggggacccctggccgcgcatcctctggaggctgccgtccaagaggatgatcgacgcgctcttcagttttgatagcagaatcaaggtgtttgccaatgggaccctggtggtgaaatcagtgacggacaaagatgccggagattacctgtgcgtagctcgaaataaggttggtgatgactacgtggtgctcaaagtggatgtggtgatgaaaccggccaagattgaacacaaggaggagaacgaccacaaagtcttctacgggggtgacctgaaagtggactgtgtggccaccgggcttcccaatcccgagatctcctggagcctcccagacgggagtctggtgaactccttcatgcagtcggatgacagcggtggacgcaccaagcgctatgtcgtcttcaacaatgggacactctactttaacgaagtggggatgagggaggaaggagactacacctgctttgctgaaaatcaggtcgggaaggacgagatgagagtcagagtcaaggtggtgacagcgcccgccaccatccggaacaagacttacttggcggttcaggtgccctatggagacgtggtcactgtagcctgtgaggccaaaggagaacccatgcccaaggtgacttggttgtccccaaccaacaaggtgatccccacctcctctgagaagtatcagatataccaagatggcactctccttattcagaaagcccagcgttctgacagcggcaactacacctgcctggtcaggaacagcgcgggagaggataggaagacggtgtggattcacgtcaacgtccagccacccaagatcaacggtaaccccaaccccatcaccaccgtgcgggagatagcagccgggggcagtcggaaactgattgactgcaaagctgaaggcatccccaccccgagggtgttatgggcttttcccgagggtgtggttctgccagctccatactatggaaaccggatcactgtccatggcaacggttccctggacatcaggagtttgaggaagagcgactccgtccagctggtatgcatggcacgcaacgagggaggggaggcgaggttgatcgtgcagctcactgtcctggagcccatggagaaacccatcttccacgacccgatcagcgagaagatcacggccatggcgggccacaccatcagcctcaactgctctgccgcggggaccccgacacccagcctggtgtgggtccttcccaatggcaccgatctgcagagtggacagcagctgcagcgcttctaccacaaggctgacggcatgctacacattagcggtctctcctcggtggacgctggggcctaccgctgcgtggcccgcaatgccgctggccacacggagaggctggtctccctgaaggtgggactgaagccagaagcaaacaagcagtatcataacctggtcagcatcatcaatggtgagaccctgaagctcccctgcacccctcccggggctgggcagggacgtttctcctggacgctccccaatggcatgcatctggagggcccccaaaccctgggacgcgtttctcttctggacaatggcaccctcacggttcgtgaggcctcggtgtttgacaggggtacctatgtatgcaggatggagacggagtacggcccttcggtcaccagcatccccgtgattgtgatcgcctatcctccccggatcaccagcgagcccaccccggtcatctacacccggcccgggaacaccgtgaaactgaactgcatggctatggggattcccaaagctgacatcacgtgggagttaccggataagtcgcatctgaaggcaggggttcaggctcgtctgtatggaaacagatttcttcacccccagggatcactgaccatccagcatgccacacagagagatgccggcttctacaagtgcatggcaaaaaacattctcggcagtgactccaaaacaacttacatccacgtcttctgaaatgtggattccagaatgattgcttaggaactgacaacaaagcggggtttgtaagggaagccaggttggggaataggagctcttaaataatgtgtcacagtgcatggtggcctctggtgggtttcaagttgaggttgatcttgatctacaattgttgggaaaaggaagcaatgcagacacgagaaggagggctcagccttgctgagacactttcttttgtgtttacatcatgccaggggcttcattcagggtgtctgtgctctgactgcaatttttcttcttttgcaaatgccactcgactgccttcataagcgtccataggatatctgaggaacattcatcaaaaataagccatagacatgaacaacacctcactaccccattgaagacgcatcacctagttaacctgctgcagtttttacatgatagactttgttccagattgacaagtcatctttcagttatttcctctgtcacttcaaaactccagcttgcccaataaggatttagaaccagagtgactgatatatatatatatattttaattcagagttacatacatacagctaccattttatatgaaaaaagaaaaacatttcttcctggaactcactttttatataatgttttatatatatattttttcctttcaaatcagacgatgagactagaaggagaaatactttctgtcttattaaaattaataaattattggtctttacaagacttggatacattacagcagacatggaaatataattttaaaaaatttctctccaacctccttcaaattcagtcaccactgttatattaccttctccaggaaccctccagtggggaaggctgcgatattagatttccttgtatgcaaagtttttgttgaaagctgtgctcagaggaggtgagaggagaggaaggagaaaactgcatcataactttacagaattgaatctagagtcttccccgaaaagcccagaaacttctctgcagtatctggcttgtccatctggtctaaggtggctgcttcttccccagccatgagtcagtttgtgcccatgaataatacacgacctgttatttccatgactgctttactgtatttttaaggtcaatatactgtacatttgataataaaataatattctcccaaaaaaaaaa

SEQ ID NO: 164 - DNA, 1840 bp, Homo sapiens
tccacacacacaaaaaacctgcgcgtgaggggggaggaaaagcagggcctttaaaaaggcaatcacaacaacttttgctgccaggatgcccttgctttggctgagaggatttctgttggcaagttgctggattatagtgaggagttcccccaccccaggatccgaggggcacagcgcggcccccgactgtccgtcctgtgcgctggccgccctcccaaaggatgtacccaactctcagccagagatggtggaggccgtcaagaagcacattttaaacatgctgcacttgaagaagagacccgatgtcacccagccggtacccaaggcggcgcttctgaacgcgatcagaaagcttcatgtgggcaaagtcggggagaacgggtatgtggagatagaggatgacattggaaggagggcagaaatgaatgaacttatggagcagacctcggagatcatcacgtttgccgagtcaggaacagccaggaagacgctgcacttcgagatttccaaggaaggcagtgacctgtcagtggtggagcgtgcagaagtctggctcttcctaaaagtccccaaggccaacaggaccaggaccaaagtcaccatccgcctcttccagcagcagaagcacccgcagggcagcttggacacaggggaagaggccgaggaagtgggcttaaagggggagaggagtgaactgttgctctctgaaaaagtagtagacgctcggaagagcacctggcatgtcttccctgtctccagcagcatccagcggttgctggaccagggcaagagctccctggacgttcggattgcctgtgagcagtgccaggagagtggcgccagcttggttctcctgggcaagaagaagaagaaagaagaggagggggaagggaaaaagaagggcggaggtgaaggtggggcaggagcagatgaggaaaaggagcagtcgcacagacctttcctcatgctgcaggcccggcagtctgaagaccaccctcatcgccggcgtcggcggggcttggagtgtgatggcaaggtcaacatctgctgtaagaaacagttctttgtcagtttcaaggacatcggctggaatgactggatcattgctccctctggctatcatgccaactactgcgagggtgagtgcccgagccatatagcaggcacgtccgggtcctcactgtccttccactcaacagtcatcaaccactaccgcatgcggggccatagcccctttgccaacctcaaatcgtgctgtgtgcccaccaagctgagacccatgtccatgttgtactatgatgatggtcaaaacatcatcaaaaaggacattcagaacatgatcgtggaggagtgtgggtgctcatagagttgcccagcccagggggaaagggagcaagagttgtccagagaagacagtggcaaaatgaagaaatttttaaggtttctgagttaaccagaaaaatagaaattaaaaacaaaacaaaacaaaaaaaaaaacaaaaaaaaacaaaagtaaattaaaaacaaacctgatgaaacagatgaaacagatgaaggaagatgtggaaatcttagcctgccttagccagggctcagagatgaagcagtgaagagacagattgggagggaaagggagaatggtgtaccctttatttcttctgaaatcacactgatgacatcagttgtttaaacggggtattgtcctttccccccttgaggttcccttgtgagcttgaatcaaccaatctgatctgcagtagtgtggactagaacaacccaaatagcatctagaaagccatgagtttgaaagggcccatcacaggcactttcctagcctaat

SEQ ID NO: 165 - DNA, 11185 bp, Homo sapiens; identical to SEQ ID NO: 120

SEQ ID NO: 166 - protein, 339 aa, Homo sapiens
MWQLWASLCCLLVLANARSRPSFHPLSDELVNYVNKRNTTWQAGHNFYNVDMSYLKRLCGTFLGGPKPPQRVMFTEDLKLPASFDAREQWPQCPTIKEIRDQGSCGSCWAFGAVEAISDRICIHTNAHVSVEVSAEDLLTCCGSMCGDGCNGGYPAEAWNFWTRKGLVSGGLYESHVGCRPYSIPPCEHHVNGSRPPCTGEGDTPKCSKICEPGYSPTYKQDKHYGYNSYSVSNSEKDIMAEIYKNGPVEGAFSVYSDFLLYKSGVYQHVTGEMMGGHAIRILGWGVENGTPYWLVANSWNTDWGDNGFFKILRGQDHCGIESEVVAGIPRTDQYWEKI

SEQ ID NO: 167 - protein, 286 aa, Homo sapiens
MRLLPRLLLLLLLVFPATVLFRGGPRGSLAVAQDLTEDEETVEDSIIEDEDDEAEVEEDEPTDLVEDKEEEDVSGEPEASPSADTTILFVKGEDFPANNIVKFLVGFTNKGTEDFIVESLDASFRYPQDHQFYIQNFTALPLNTVVPPQRQATFEYSFIPAEPMGGRPFGLVINLNYKDLNGNVFQDAVFNQTVTVIEREDGLDGETIFMYMFLAGLGLLVIVGLHQLLESRKRKRPIQKVEMGTSSQNDVDMSWIPQETLNQINKASPRRLPRKRAQKRSVGSDE

SEQ ID NO: 168 - protein, 433 aa, Homo sapiens
MPDYLGADQRKTKEDEKDDKPIRALDEGDIALLKTYGQSTYSRQIKQVEDDIQQLLKKINELTGIKESDTGLAPPALWDLAADKQTLQSEQPLQVARCTKIINADSEDPKYIINVKQFAKFVVDLSDQVAPTDIEEGMRVGVDRNKYQIHIPLPPKIDPTVTMMQVEEKPDVTYSDVGGCKEQIEKLREVVETPLLHPERFVNLGIEPPKGVLLFGPPGTGKTLCARAVANRTDACFIRVIGSELVQKYVGEGARMVRELFEMARTKKACLIFFDEIDAIGGARFDDGAGGDNEVQRTMLELINQLDGFDPRGNIKVLMATNRPDTLDPALMRPGRLDRKIEFSLPDLEGRTHIFKIHARSMSVERDIRFELLARLCPNSTGAEIRSVCTEAGMFAIRARRKIATEKDFLEAVNKVIKSYAKFSATPRYMTYN

SEQ ID NO: 169 - protein, 529 aa, Homo sapiens [sequence omitted]

SEQ ID NO: 170 - protein, 971 aa, Homo sapiens
MELSDANLQTLTEYLKKTLDPDPAIRRPAEKFLESVEGNQNYPLLLLTLLEKSQDNVIKVCASVTFKNYIKRNWRIVEDEPNKICEADRVAIKANIVHLMLSSPEQIQKQLSDAISIIGREDFPQKWPDLLTEMVNRFQSGDFHVINGVLRTAHSLFKRYRHEFKSNELWTEIKLVLDAFALPLTNLFKATIELCSTHANDASALRILFSSLILISKLFYSLNFQDLPEFFEDNMETWMNNFHTLLTLDNKLLQTDDEEEAGLLELLKSQICDNAALYAQKYDEEFQRYLPRFVTAIWNLLVTTGQEVKYDLLVSNAIQFLASVCERPHYKNLFEDQNTLTSICEKVIVPNMEFRAADEEAFEDNSEEYIRRDLEGSDIDTRRRAACDLVRGLCKFFEGPVTGIFSGYVNSMLQEYAKNPSVNWKHKDAAIYLVTSLASKAQTQKHGITQANELVNLTEFFVNHILPDLKSANVNEFPVLKADGIKYIMIFRNQVPKEHLLVSIPLLINHLQAESIVVHTYAAHALERLFTMRGPNNATLFTAAEIAPFVEILLTNLFKALTLPGSSENEYIMKAIMRSFSLLQEAIIPYIPTLITQLTQKLLAVSKNPSKPHFNHYMFEAICLSIRITCKANPAAVVNFEEALFLVFTEILQNDVQEFIPYVFQVMSLLLETHKNDIPSSYMALFPHLLQPVLWERTGNIPALVRLLQAFLERGSNTIASAAADKIPGLLGVFQKLIASKANDHQGFYLLNSIIEHMPPESVDQYRKQIFILLFQRLQNSKTTKFIKSFLVFINLYCIKYGALALQEIFDGIQPKMFGMVLEKIIIPEIQKVSGNVEKKICAVGITKLLTECPPMMDTEYTKLWTPLLQSLIGLFELPEDDTIPDEEHFIDIEDTPGYQTAFSQLAFAGKKEHDPVGQMVNNPKIHLAQSLHKLSTACPGRVPSMVSTSLNAEALQYLQGYLQAASVTLL

SEQ ID NO: 171 - protein, 184 aa, Homo sapiens
MPQSKSRKIAILGYRSVGKSSLTIQFVEGQFVDSYDPTIENTFTKLITVNGQEYHLQLVDTAGQDEYSIFPQTYSIDINGYILVYSVTSIKSFEVIKVIHGKLLDMVGKVQIPIMLVGNKKDLHMERVISYEEGKALAESWNAAFLESSAKENQTAVDVFRRIILEAEKMDGAASQGKSSCSVM

SEQ ID NO: 172 - protein, 514 aa, Homo sapiens
MADAEVIILPKKHKKKKERKSLPEEDVAEIQHAEEFLIKPESKVAKLDTSQWPLLLKNFDKLNVRTTHYTPLACGSNPLKREIGDYIRTGFINLDKPSNPSSHEVVAWIRRILRVEKTGHSGTLDPKVTGCLIVCIERATRLVKSQQSAGKEYVGIVRLHNAIEGGTQLSRALETLTGALFQRPPLIAAVKRQLRVRTIYESKMIEYDPERRLGIFWVSCEAGTYIRTLCVHLGLLLGVGGQMQELRRVRSGVMSEKDHMVTMHDVLDAQWLYDNHKDESYLRRVVYPLEKLLTSHKRLVMKDSAVNAICYGAKIMLPGVLRYEDGIEVNQEIVVITTKGEAICMAIALMTTAVISTCDHGIVAKIKRVIMERDTYPRKWGLGPKASQKKLMIKQGLLDKHGKPTDSTPATWKQEYVDYSESAKKEVVAEVVKAPQVVAEAAKTAKRKRESESESDETPPAAPQLIKKEKKKSKKDKKAKAGLESGAEPGDGDSDTTKKKKKKKKAKEVELVSE

SEQ ID NO: 173 - protein, 258 aa, Homo sapiens
MLPLCLVAALLLAAGPGPSLGDEAIHCPPCSEEKLARCRPPVGCEELVREAGCGCCATCALGLGMPCGVYTPRCGSGLRCYPPRGVEKPLHTLMHGQGVCMELAEIEAIQESLQPSDKDEGDHPNNSFSPCSAHDRRCLQKHFAKIRDRSTSGGKMKVNGAPREDARPVPQGSCQSELHRALERLAASQSRTHEDLYFIPIPNCDRNGNFHPKQCHPALDGQRGKCWCVDRKTGVKLPGGLEPKGELDCHQLADSFRE

SEQ ID NO: 174 - protein, 1233 aa, Homo sapiens
MGFLKLIEIENFKSYKGRQIIGPFQRFTAIIGPNGSGKSNLMDAISFVLGEKTSNLRVKTLRDLIHGAPVGKPAANRAFVSMVYSEEGAEDRTFARVIVGGSSEYKINNKVVQLHEYSEELEKLGILIKARNFLVFQGAVESIAMKNPKERTALFEEISRSGELAQEYDKRKKEMVKAEEDTQFNYHRKKNIAAERKEAKQEKEEADRYQRLKDEVVRAQVQLQLFKLYHNEVEIEKLNKELASKNKEIEKDKKRMDKVEDELKEKKKELGKMMREQQQIEKEIKEKDSELNQKRPQYIKAKENTSHKIKKLEAAKKSLQNAQKHYKKRKGDMDELEKEMLSVEKARQEFEERMEEESQSQGRDLTLEENQVKKYHRLKEEASKRAATLAQELEKFNRDQKADQDRLDLEERKKVETEAKIKQKLREIEENQKRIEKLEEYITTSKQSLEEQKKLEGELTEEVEMAKRRIDEINKELNQVMEQLGDARIDRQESSRQQRKAEIMESIKRLYPGSVYGRLIDLCQPTQKKYQIAVTKVLGKNMDAIIVDSEKTGRDCIQYIKEQRGEPETFLPLDYLEVKPTDEKLRELKGAKLVIDVIRYEPPHIKKALQYACGNALVCDNVEDARRIAFGGHQRHKTVALDGTLFQKSGVISGGASDLKAKARRWDEKAVDKLKEKKERLTEELKEQMKAKRKEAELRQVQSQAHGLQMRLKYSQSDLEQTKTRHLALNLQEKSKLESELANFGPRINDIKRIIQSREREMKDLKEKMNQVEDEVFEEFCREIGVRNIREFEEEKVKRQNEIAKKRLEFENQKTRLGIQLDFEKNQLKEDQDKVHMWEQTVKKDENEIEKLKKEEQRHMKIIDETMAQLQDLKNQHLAKKSEVNDKNHEMEEIRKKLGGANKEMTHLQKEVTAIETKLEQKRSDRHNLLQACKMQDIKLPLSKGTMDDISQEEGSSQGEDSVSGSQRISSIYAREALIEIDYGDLCEDLKDAQAEEEIKQEMNTLQQKLNEQQSVLQRIAAPNMKAMEKLESVRDKFQETSDEFEAARKRAKKAKQAFEQIKKERFDRFNACFESVATNIDEIYKALSRNSSAQAFLGPENPEEPYLDGINYNCVAPGKRFRPMDNLSGGEKTVAALALLFAIHSYKPAPFFVLDEIDAALDNTNIGKVANYIKEQSTCNFQAIVISLKEEFYTKAESLIGVYPEQGDCVISKVLTFDLTKYPDANPNPNEQ

SEQ ID NO: 175 - protein, 501 aa, Homo sapiens
MNRSRQVTCVAWVRCGVAKETPDKVELSKEEVKRLIAEAKEKLQEEGGGSDEEETGSPSEDGMQSARTQARPREPLEDGDPEDDRTLDDDELAEYDLDKYDEEGDPDAETLGESLLGLTVYGSNDQDPYVTLKDTEQYEREDFLIKPSDNLIVCGRAEQDQCNLEVHVYNQEEDSFYVHHDILLSAYPLSVEWLNFDPSPDDSTGNYIAVGNMTPVIEVWDLDIVDSLEPVFTLGSKLSKKKKKKGKKSSSAEGHTDAVLDLSWNKLIRNVLASASADNTVILWDMSLGKPAASLAVHTDKVQTLQFHPFEAQTLISGSYDKSVALYDCRSPDESHRMWRFSGQIERVTWNHFSPCHFLASTDDGFVYNLDARSDKPIFTLNAHNDEISGLDLSSQIKGCLVTASADKYVKIWDILGDRPSLVHSRDMKMGVLFCSSCCPDLPFIYAFGGQKEGLRVWDISTVSSVNEAFGRRERLVLGSARNSSISGPFGSRSSDTPMES

SEQ ID NO: 176 - protein, 488 aa, Homo sapiens
MAYSQGGGKKKVCYYYDGDIGNYYYGQGHPMKPHRIRMTHNLLLNYGLYRKMEIYRPHKATAEEMTKYHSDEYIKFLRSIRPDNMSEYSKQMHIFNVGEDCPAFDGLFEFCQLSTGGSVAGAVKLNRQQTDMAVNWAGGLHHAKKYEASGFCYVNDIVLAILELLKYHQRVLYIDIDIHHGDGVEEAFYTTDRVMTVSFHKYGEYFPGTGDLRDIGAGKGKYYAVNFPMCDGIDDESYGQIFKPIISKVMEMYQPSAVVLQCGADSLSGDRLGCFNLTVKGHAKCVEVVKTFNLPLLMLGGGGYTIRNVARCWTYETAVALDCEIPNELPYNDYFEYFGPDFKLHISPSNMTNQNTPEYMEKIKQRLFENLRMLPHAPGVQMQAIPEDAVHEDSGDEDGEDPDKRISIRASDKRIACDEEFSDSEDEGEGGRRNVADHKKGAKKARIEEDKKETEDKKTDVKEEDKSKDNSGEKTDTKGTKSEQLSNP

SEQ ID NO: 177 - protein, 270 aa, Homo sapiens
MGNTSSERAALERHGGHKTPRRDSSGGTKDGDRPKILMDSPEDADLFHSEEIKAPEKEEFLAWQHDLEVNDKAPAQARPTVFRWTGGGKEVYLSGSFNNWSKLPLTRSHNNFVAILDLPEGEHQYKFFVDGQWTHDPSEPIVTSQLGTVNNIIQVKKTDFEVFDALMVDSQKCSDVSELSSSPPGPYHQEPYVCKPEERFRAPPILPPHLLQVILNKDTGISCDPALLPEPNHVMLNHLYALSIKDGVMVLSATHRYKKKYVTTLLYKPI

SEQ ID NO: 178 - protein, 514 aa, Homo sapiens
MADYLISGGTSYVPDDGLTAQQLFNCGDGLTYNDFLILPGYIDFTADQVDLTSALTKKITLKTPLVSSPMDTVTEAGMAIAMALTGGIGFIHHNCTPEFQANEVRKVKKYEQGFITDPVVLSPKDRVRDVFEAKARHGFCGIPITDTGRMGSRLVGIISSRDIDFLKEEEHDCFLEEIMTKREDLVVAPRSITLKEANEILQRSKKGKLPIVNEDDELVAIIARTDLKKNRDYPLASKDAKKQLLCGAAIGTHEDDKYRLDLLAQAGVDVVVLDSSQGNSIFQINMIKYIKDKYPNLQVIGGNVVTAAQAKNLIDAGVDALRVGMGSGSICITQEVLACGRPQATAVYKVSEYARRFGVPVIADGGIQNVGHIAKALALGASTVMMGSLLAATTEAPGEYFFSDGIRLKKYRGMGSLDAMDKHLSSQNRYFSEADKIKVAQGVSGAVQDKGSIHKFVPYLIAGIQHSCQDIGAKSLTQVRAMMYSGELKFEKRTSSAQVEGGVHSLHSYEKRLF

SEQ ID NO: 179 - protein, 152 aa, Homo sapiens
MSTPARRRLMRDFKRLQEDPPAGVSGAPSENNIMVWNAVIFGPEGTPFEDGTFKLTIEFTEEYPNKPPTVRFVSKMFHPNVYADGSICLDILQNRWSPTYDVSSILTSIQSLLDEPNPNSPANSQAAQLYQENKREYEKRVSAIVEQSWRDC

SEQ ID NO: 180 - protein, 260 aa, Homo sapiens
MPQNEYIELHRKRYGYRLDYHEKKRKKESREAHERSKKAKKMIGLKAKLYHKQRHAEKIQMKKTIKMHEKRNTKQKNDEKTPQGAVPAYLLDREGQSRAKVLSNMIKQKRKEKAGKWEVPLPKVRAQGETEVLKVIRTGKRKKKAWKRMVTKVCFVGDGFTRKPPKYERFIRPMGLRFKKAHVTHPELKATFCLPILGVKKNPSSPLYTTLGVITKGTVIEVNVSELGLVTQGGKVIWGKYAQVTNNPENDGCINAVLLV

SEQ ID NO: 181 - protein, 790 aa, Homo sapiens
MEATSREAAPAKSSASGPNAPPALFELCGRAVSAHMGVLESGVWALPGPILQSILPLLNIYYLERIEETALKKGLSTQAIWRRLWDELMKTRPSSLESVTCWRAKFMEAFFSHVLRGTIDVSSDRRLCDQRFSPLLHSSRHVRQLTICNMLQGATELVAEPNRRVLETLASSLHTLKFRHLLFSDVAAQQSLRQLLHQLIHHGAVSQVSLYSWPVPESALFILILTMSAGFWQPGPGGPPCRLCGEASRGRAPSRDEGSLLLGSRRPRRDAAERCAAALMASRRKSEAKQMPRAAPATRVTRRSTQESLTAGGTDLKRELHPPATSHEAPGTKRSPSAPAATSSASSSTSSYKRAPASSAPQPKPLKRFKRAAGKKGARTRQGPGAESEDLYDFVFIVAGEKEDGEEMEIGEVACGALDGSDPSCLGLPALEASQRFRSISTLELFTVPLSTEAALTLCHLLSSWVSLESLTLSYNGLGSNIFRLLDSLRALSGQAGCRLRALHLSDLFSPLPILELTRAIVRALPLLRVLSIRVDHPSQRDNPGVPGNAGPPSHIIGDEEIPENCLEQLEMGFPRGAQPAPLLCSVLKASGSLQQLSLDSATFASPQDFGLVLQTLKEYNLALKRLSFHDMNLADCQSEVLFLLQNLTLQEITFSFCRLFEKRPAQFLPEMVAAMKGNSTLKGLRLPGNRLGNAGLLALADVFSEDSSSSLCQLDISSNCIKPDGLLEFAKRLERWGRGAFGHLRLFQNWLDQDAVTAREAIRRLRATCHVVSDSWDSSQAFADYVSTM

SEQ ID NO: 182 - protein, 2058 aa, Homo sapiens
MDNFFTEGTRVWLRENGQHFPSTVNSCAEGIVVFRTDYGQVFTYKQSTITHQKVTAMHPTNEEGVDDMASLTELHGGSIMYNLFQRYKRNQIYTYIGSILASVNPYQPIAGLYEPATMEQYSRRHLGELPPHIFAIANECYRCLWKRYDNQCILISGESGAGKTESTKLILKFLSVISQQSLELSLKEKTSCVERAILESSPIMEAFGNAKTVYNNNSSRFGKFVQLNICQKGNIQGGRIVDYLLEKNRVVRQNPGERNYHIFYALLAGLEHEEREEFYLSTPENYHYLNQSGCVEDKTISDQESFREVITAMDVMQFSKEEVREVSRLLAGILHLGNIEFITAGGAQVSFKTALGRSAELLGLDPTQLTDALTQRSMFLRGEEILTPLNVQQAVDSRDSLAMALYACCFEWVIKKINSRIKGNEDFKSIGILDIFGFENFEVNHFEQFNINYANEKLQEYFNKHIFSLEQLEYSREGLVWEDIDWIDNGECLDLIEKKLGLLALINEESHFPQATDSTLLEKLHSQHANNHFYVKPRVAVNNFGVKHYAGEVQYDVRGILEKNRDTFRDDLLNLLRESRFDFIYDLFEHVSSRNNQDTLKCGSKHRRPTVSSQFKDSLHSLMATLSSSNPFFVRCIKPNMQKMPDQFDQAVVLNQLRYSGMLETVRIRKAGYAVRRPFQDFYKRYKVLMRNLALPEDVRGKCTSLLQLYDASNSEWQLGKTKVFLRESLEQKLEKRREEEVSHAAMVIRAHVLGFLARKQYRKVLYCVVIIQKNYRAFLLRRRFLHLKKAAIVFQKQLRGQIARRVYRQLLAEKREQEEKKKQEEEEKKKREEEERERERERREAELRAQQEEETRKQQELEALQKSQKEAELTRELEKQKENKQVEEILRLEKEIEDLQRMKEQQELSLTEASLQKLQERRDQELRRLEEEACRAAQEFLESLNFDEIDECVRNIERSLSVGSEFSSELAESACEEKPNFNFSQPYPEEEVDEGFEADDDAFKDSPNPSEHGHSDQRTSGIRTSDDSSEEDPYMNDTVVPTSPSADSTVLLAPSVQDSGSLHNSSSGESTYCMPQNAGDLPSPDGDYDYDQDDYEDGAITSGSSVTFSNSYGSQWSPDYRCSVGTYNSSGAYRFSSEGAQSSFEDSEEDFDSRFDTDDELSYRRDSVYSCVTLPYFHSFLYMKGGLMNSWKRRWCVLKDETFLWFRSKQEALKQGWLHKKGGGSSTLSRRNWKKRWFVLRQSKLMYFENDSEEKLKGTVEVRTAKEIIDNTTKENGIDIIMADRTFHLIAESPEDASQWFSVLSQVHASTDQEIQEMHDEQANPQNAVGTLDVGLIDSVCASDSPDRPNSFVIITANRVLHCNADTPEEMHHWITLLQRSKGDTRVEGQEFIVRGWLHKEVKNSPKMSSLKLKKRWFVLTHNSLDYYKSSEKNALKLGTLVLNSLCSVVPPDEKIFKETGYWNVTVYGRKHCYRLYTKLLNEATRWSSAIQNVTDTKAPIDTPTQQLIQDIKENCLNSDVVEQIYKRNPILRYTHHPLHSPLLPLPYGDINLNLLKDKGYTTLQDEAIKIFNSLQQLESMSDPIPIIQGILQTGHDLRPLRDELYCQLIKQTNKVPHPGSVGNLYSWQILTCLSCTFLPSRGILKYLKFHLKRIREQFPGTEMEKYALFTYESLKKTKCREFVPSRDEIEALIHRQEMTSTVYCHGGGSCKITINSHTTAGEVVEKLIRGLAMEDSRNMFALFEYNGHVDKAIESRTVVADVLAKFEKLAATSEVGDLPWKFYFKLYCFLDTDNVPKDSVEFAFMFEQAHEAVIHGHHPAPEENLQVLAALRLQYLQGDYTLHAAIPPLEEVYSLQRLKARISQSTKTFTPCERLEKRRTSFLEGTLRRSFRTGSVVRQKVEEEQMLDMWIKEEVSSARASIIDKWRKFQGMNQEQAMAKYMALIKEWPGYGSTLFDVECKEGGFPQELWLGVSADAVSVYKRGEGRPLEVFQYEHILSFGAPLANTYKIVVDERELLFETSEVVDVAKLMKAYISMIVKKRYSTTRSASSQGSSR

SEQ ID NO: 183 - protein, 1210 aa, Homo sapiens [sequence omitted]

SEQ ID NO: 184 - protein, 453 aa, Homo sapiens
MPKNKKRNTPHRGSSAGGGGSGAAAATAATAGGQHRNVQPFSDEDASIETMSHCSGYSDPSSFAEDGPEVLDEEGTQEDLEYKRKGLIDLTLDKSAKTRQAALEGIKNALASKMLYEFILERRMTLTDSIERCLKKGKSDEQRAAAALASVLCIQLGPGIESEEILKTLGPILKKIICDGSASMQARQTCATCFGVCCFIATDDITELYSTLECLENIFTKSYLKEKDTTVICSTPNTVLHISSLLAWTLLLTICPINEVKKKLEMHFHKLPSLLSCDDVNMRIAAGESLALLFELARGIESDFFYEDMESLTQMLRALATDGNKHRAKVDKRKQRSVFRDVLRAVEERDFPTETIKFGPERMYIDCWVKKHTYDTFKEVLGSGMQYPLAVKMEFLENVFETWTPSDALMLQRLKTMKISRFERHLYNSAAFKARTKARSKCRDKRADVGEFF

SEQ ID NO: 185 - protein, 341 aa, Homo sapiens
MPKRKVTFQGVGDEEDEDEIIVPKKKLVDPVAGSGGPGSRFKGKHSLDSDEEEDDDDGGSSKYDILASEDVEGQEAATLPSEGGVRITPFNLQEEMEEGHFDADGNYFLNRDAQIRDSWLDNIDWVKIRERPPGQRQASDSEEEDSLGQTSMSAQALLEGLLELLLPRETVAGALRRLGARGGGKGRKGPGQPSSPQRLDRLSGLADQMVARGNLGVYQETRERLAMRLKGLGCQTLGPHNPTPPPSLDMFAEELAEEELETPTPTQRGEAESRGDGLVDVMWEYKWENTGDAELYGPFTSAQMQTWVSEGYFPDGVYCRKLDPPGGQFYNSKRIDFDLYT

SEQ ID NO: 186 - protein, 182 aa, Homo sapiens
MGLLSILRKLKSAPDQEVRILLLGLDNAGKTTLLKQLASEDISHITPTQGFNIKSVQSQGFKLNVWDIGGQRKIRPYWKNYFENTDILIYVIDSADRKRFEETGQELAELLEEEKLSCVPVLIFANKQDLLTAAPASEIAEGLNLHTIRDRVWQIQSCSALTGEGVQDGMNWVCKNVNAKKK

SEQ ID NO: 187 - protein, 398 aa, Homo sapiens
MALLRRPTVSSDLENIDTGVNSKVKSHVTIRRTVLEEIGNRVTTRAAQVAKKAQNTKVPVQPTKTTNVNKQLKPTASVKPVQMEKLAPKGPSPTPEDVSMKEENLCQAFSDALLCKIEDIDNEDWENPQLCSDYVKDIYQYLRQLEVLQSINPHFLDGRDINGRMRAILVDWLVQVHSKFRLLQETLYMCVGIMDRFLQVQPVSRKKLQLVGITALLLASKYEEMFSPNIEDFVYITDNAYTSSQIREMETLILKELKFELGRPLPLHFLRRASKAGEVDVEQHTLAKYLMELTLIDYDMVHYHPSKVAAAASCLSQKVLGQGKWNLKQQYYTGYTENEVLEVMQHMAKNVVKVNENLTKFIAIKNKYASSKLLKISMIPQLNSKAVKDLASPLIGRS

SEQ ID NO: 188 - protein, 376 aa, Homo sapiens
MQWASLLLLAGLFSLSQAQYEDDPHWWFHYLRSQQSTYYDPYDPYPYETYEPYPYGVDEGPAYTYGSPSPPDPRDCPQECDCPPNFLTAMYCDNRNLKYLPFVPSRMKYVYFQNNQITSIQEGVFDNATGLLWIALHGNQITSDKVGRKVFSKLRHLERLYLDHNNLTRMPGPLPRSLRELHLDHNQISRVPNNALEGLENLTALYLQHDEIQEVGSSMRGLRSLILLDLSYNHLRKVPDGLPSALEQLYMEHNNVYTVPDSYFRGAPKLLYVRLSHNSLTNNGLASNTFNSSSLLELDLSYNQLQKIPPVNTNLENLYLQGNRINEFSISSFCTVVDVVNFSKLQVVRLDGNEIKRSAMPADAPLCLRLASLIEI

SEQ ID NO: 189 - protein, 535 aa, Homo sapiens
MEEGARHRNNTEKKHPGGGESDASPEAGSGGGGVALKKEIGLVSACGIIVGNIIGSGIFVSPKGVLENAGSVGLALIVWIVTGFITVVGALCYAELGVTIPKSGGDYSYVKDIFGGLAGFLRLWIAVLVIYPTNQAVIALTFSNYVLQPLFPTCFPPESGLRLLAAICLLLLTWVNCSSVRWATRVQDIFTAGKLLALALIIIMGIVQICKGEYFWLEPKNAFENFQEPDIGLVALAFLQGSFAYGGWNFLNYVTEELVDPYKNLPRAIFISIPLVTFVYVFANVAYVTAMSPQELLASNAVAVTFGEKLLGVMAWIMPISVALSTFGGVNGSLFTSSRLFFAGAREGHLPSVLAMIHVKRCTPIPALLFTCISTLLMLVTSDMYTLINYVGFINYLFYGVTVAGQIVLRWKKPDIPRPIKINLLFPIIYLLFWAFLLVFSLWSEPVVCGIGLAIMLTGVPVYFLGVYWQHKPKCFSDFIELLTLVSQKMCVVVYPEVERGSGTEEANEDMEEQQQPMYQPTPTKDKDVAGQPQP

SEQ ID NO: 190 - protein, 225 aa, Homo sapiens
MNSNVENLPPHIIRLVYKEVTTLTADPPDGIKVFPNEEDLTDLQVTIEGPEGTPYAGGLFRMKLLLGKDFPASPPKGYFLTKIFHPNVGANGEICVNVLKRDWTAELGIRHVLLTIKCLLIHPNPESALNEEAGRLLLENYEEYAARARLLTEIHGGAGGPSGRAEAGRALASGTEASSTDPGAPGGPGGAEGPMAKKHAGERDKKLAAKKKTDKKRALRALRRL

SEQ ID NO: 191 - protein, 485 aa, Homo sapiens
MRKRAPQSEMAPAGVSLRATILCLLAWAGLAAGDRVYIHPFHLVIHNESTCEQLAKANAGKPKDPTFIPAPIQAKTSPVDEKALQDQLVLVAAKLDTEDKLRAAMVGMLANFLGFRIYGMHSELWGVVHGATVLSPTAVFGTLASLYLGALDHTADRLQAILGVPWKDKNCTSRLDAHKVLSALQAVQGLLVAQGRADSQAQLLLSTVVGVFTAPGLHLKQPFVQGLALYTPVVLPRSLDFTELDVAAEKIDRFMQAVTGWKTGCSLMGASVDSTLAFNTYVHFQGKMKGFSLLAEPQEFWVDNSTSVSVPMLSGMGTFQHWSDIQDNFSVTQVPFTESACLLLIQPHYASDLDKVEGLTFQQNSLNWMKKLSPRTIHLTMPQLVLQGSYDLQDLLAQAELPAILHTELNLQKLSNDRIRVGEVLNSIFFELEADEREPTESTQQLNKPEVLEVTLNRPFLFAVYDQSATALHFLGRVANPLSTA

SEQ ID NO: 192 - protein, 279 aa, Homo sapiens
MTERFDCHHCNESLFGKKYILREESPYCVVCFETLFANTCEECGKPIGCDCKDLSYKDRHWHEACFHCSQCRNSLVDKPFAAKEDQLLCTDCYSNEYSSKCQECKKTIMPGTRKMEYKGSSWHETCFICHRCQQPIGTKSFIPKDNQNFCVPCYEKQHAMQCVQCKKPITTGGVTYREQPWHKECFVCTACRKQLSGQRFTARDDFAYCLNCFCDLYAKKCAGCTNPISGLGGTKYISFEERQWHNDCFNCKKCSLSLVGRGFLTERDDILCPDCGKDI

SEQ ID NO: 193 - protein, 738 aa, Homo sapiens
MEKSRMNLPKGPDTLCFDKDEFMKEDFDVDHFVSDCRKRVQLEELRDDLELYYKLLKTAMVELINKDYADFVNLSTNLVGMDKALNQLSVPLGQLREEVLSLRSSVSEGIRAVDERMSKQEDIRKKKMCVLRLIQVIRSVEKIEKILNSQSSKETSALEASSPLLTGQILERIATEFNQLQFHAVQSKGMPLLDKVRPRIAGITAMLQQSLEGLLLEGLQTSDVDIIRHCLRTYATIDKTRDAEALVGQVLVKPYIDEVIIEQFVESHPNGLQVMYNKLLEFVPHHCRLLREVTGGAISSEKGNTVPGYDFLVNSVWPQIVQGLEEKLPSLFNPGNPDAFHEKYTISMDFVRRLERQCGSQASVKRLRAHPAYHSFNKKWNLPVYFQIRFREIAGSLEAALTDVLEDAPAESPYCLLASHRTWSSLRRCWSDEMFLPLLVHRLWRLTLQILARYSVFVNELSLRPISNESPKEIKKPLVTGSKEPSITQGNTEDQGSGPSETKPVVSISRTQLVYVVADLDKLQEQLPELLEIIKPKLEMIGFKNFSSISAALEDSQSSFSACVPSLSSKIIQDLSDSCFGFLKSALEVPRLYRRTNKEVPTTASSYVDSALKPLFQLQSGHKDKLKQAIIQQWLEGTLSESTHKYYETVSDVLNSVKKMEESLKRLKQARKTTPANPVGPSGGMSDDDKIRLQLALDVEYLGEQIQKLGLQASDIKSFSALAELVAAAKDQATAEQP

SEQ ID NO: 194 - protein, 963 aa, Homo sapiens
MAVFPWHSRNRNYKAEFASCRLEAVPLEFGDYHPLKPITVTESKTKKVNRKGSTSSTSSSSSSSVVDPLSSVLDGTDPLSMFAATADPAALAAAMDSSRRKRDRDDNSVVGSDFEPWTNKRGEILARYTTTEKLSINLFMGSEKGKAGTATLAMSEKVRTRLEELDDFEEGSQKELLNLTQQDYVNRIEELNQSLKDAWASDQKVKALKIVIQCSKLLSDTSVIQFYPSKFVLITDILDTFGKLVYERIFSMCVDSRSVLPDHFSPENANDTAKETCLNWFFKIASIRELIPRFYVEASILKCNKFLSKTGISECLPRLTCMIRGIGDPLVSVYARAYLCRVGMEVAPHLKETLNKNFFDFLLTFKQIHGDTVQNQLVVQGVELPSYLPLYPPAMDWIFQCISYHAPEALLTEMMERCKKLGNNALLLNSVMSAFRAEFIATRSMDFIGMIKECDESGFPKHLLFRSLGLNLALADPPESDRLQILNEAWKVITKLKNPQDYINCAEVWVEYTCKHFTKREVNTVLADVIKHMTPDRAFEDSYPQLQLIIKKVIAHFHDFSVLFSVEKFLPFLDMFQKESVRVEVCKCIMDAFIKHQQEPTKDPVILNALLHVCKTMHDSVNALTLEDEKRMLSYLINGFIKMVSFGRDFEQQLSFYVESRSMFCNLEPVLVQLIHSVNRLAMETRKVMKGNHSRKTAAFVRACVAYCFITIPSLAGIFTRLNLYLHSGQVALANQCLSQADAFFKAAISLVPEVPKMINIDGKMRPSESFLLEFLCNFFSTLLIVPDHPEHGVLFLVRELLNVIQDYTWEDNSDEKIRIYTCVLHLLSAMSQETYLYHIDKVDSNDSLYGGDSKFLAENNKLCETVMAQILEHLKTLAKDEALKRQSSLGLSFFNSILAHGDLRNNKLNQLSVNLWHLAQRHGCADTRTMVKTLEYIKKQSKQPDMTHLTELALRLPLQTRT

SEQ ID NO: 195 - protein, 494 aa, Homo sapiens
MFEIKKICCIGAGYVGGPTCSVIAHMCPEIRVTVVDVNESRINAWNSPTLPIYEPGLKEVVESCRGKNLFFSTNIDDAIKEADLVFISVNTPTKTYGMGKGRAADLKYIEACARRIVQNSNGYKIVTEKSTVPVRAAESIRRIFDANTKPNLNLQVLSNPEFLAEGTAIKDLKNPDRVLIGGDETPEGQRAVQALCAVYEHWVPREKILTTNTWSSELSKLAANAFLAQRISSINSISALCEATGADVEEVATAIGMDQRIGNKFLKASVGFGGSCFQKDVLNLVYLCEALNLPEVARYWQQVIDMNDYQRRRFASRIIDSLFNTVTDKKIAILGFAFKKDTGDTRESSSIYISKYLMDEGAHLHIYDPKVPREQIVVDLSHPGVSEDDQVSRLVTISKDPYEACDGAHAVVICTEWDMFKELDYERIHKKMLKPAFIFDGRRVLDGLHNELQTIGFQIETIGKKVSSKRIPYAPSGEIPKFSLQDPPNKKPKV

SEQ ID NO: 196 - protein, 205 aa, Homo sapiens
MALQLSREQGITLRGSAEIVAEFFSFGINSILYQRGIYPSETFTRVQKYGLTLLVTTDLELIKYLNNVVEQLKDWLYKCSVQKLVVVISNIESGEVLERWQFDIECDKTAKDDSAPREKSQKAIQDEIRSVIRQITATVTFLPLLEVSCSFDLLIYTDKDLVVPEKWEESGPQFITNSEEVRLRSFTTTIHKVNSMVAYKIPVND

SEQ ID NO: 197 - protein, 427 aa, Homo sapiens
MAPKKRPETQKTSEIVLRPRNKRSRSPLELEPEAKKLCAKGSGPSRRCDSDCLWVGLAGPQILPPCRSIVRTLHQHKLGRASWPSVQQGLQQSFLHTLDSYRILQKAAPFDRRATSLAWHPTHPSTVAVGSKGGDIMLWNFGIKDKPTFIKGIGAGGSITGLKFNPLNTNQFYASSMEGTTRLQDFKGNILRVFASSDTINIWFCSLDVSASSRMVVTGDNVGNVILLNMDGKELWNLRMHKKKVTHVALNPCCDWFLATASVDQTVKIWDLRQVRGKASFLYSLPHRHPVNAACFSPDGARLLTTDQKSEIRVYSASQWDCPLGLIPHPHRHFQHLTPIKAAWHPRYNLIVVGRYPDPNFKSCTPYELRTIDVFDGNSGKMMCQLYDPESSGISSLNEFNPMGDTLASAMGYHILIWSQEEARTRK

SEQ ID NO: 198 - protein, 283 aa, Homo sapiens
MEHGSIITQARREDALVLTKQGLVSKSSPKKPRGRNIFKALFCCFRAQHVGQSSSSTELAAYKEEANTIAKSDLLQCLQYQFYQIPGTCLLPEVTEEDQGRICVVIDLDETLVHSSFKPINNADFIVPIEIEGTTHQVYVLKRPYVDEFLRRMGELFECVLFTASLAKYADPVTDLLDRCGVFRARLFRESCVFHQGCYVKDLSRLGRDLRKTLILDNSPASYIFHPENAVPVQSWFDDMADTELLNLIPIFEELSGAEDVYTSLGAAAGPLACPASKRRPSQ

SEQ ID NO: 199 - protein, 239 aa, Homo sapiens
MAHAGRTGYDNREIVMKYIHYKLSQRGYEWDAGDVGAAPPGAAPAPGIFSSQPGHTPHTAASRDPVARTSPLQTPAAPGAAAGPALSPVPPVVHLTLRQAGDDFSRRYRRDFAEMSRQLHLTPFTARGRFATVVEELFRDGVNWGRIVAFFEFGGVMCVESVNREMSPLVDNIALWMTEYLNRHLHTWIQDNGGWDAFVELYGPSMRPLFDFSWLSLKTLLSLALVGACITLGAYLGHK

SEQ ID NO: 200 - protein, 751 aa, Homo sapiens
MAFRTICVLVGVFICSICVKGSSQPQARVYLTFDELRETKTSEYFSLSHHPLDYRILLMDEDQDRIYVGSKDHILSLNINNISQEALSVFWPASTIKVEECKMAGKDPTHGCGNFVRVIQTFNRTHLYVCGSGAFSPVCTYLNRGRRSEDQVFMIDSKCESGKGRCSFNPNVNTVSVMINEELFSGMYIDFMGTDAAIFRSLTKRNAVRTDQHNSKWLSEPMFVDAHVIPDGTDPNDAKVYFFFKEKLTDNNRSTKQIHSMIARICPNDTGGLRSLVNKWTTFLKARLVCSVTDEDGPETHFDELEDVFLLETDNPRTTLVYGIFTTSSSVFKGSAVCVYHLSDIQTVFNGPFAHKEGPNHQLISYQGRIPYPRPGTCPGGAFTPNMRTTKEFPDDVVTFIRNHPLMYNSIYPIHKRPLIVRIGTDYKYTKIAVDRVNAADGRYHVLFLGTDRGTVQKVVVLPTNNSVSGELILEELEVFKNHAPITTMKISSKKQQLYVSSNEGVSQVSLHRCHIYGTACADCCLARDPYCAWDGHSCSRFYPTGKRRSRRQDVRHGNPLTQCRGFNLKAYRNAAEIVQYGVKNNTTFLECAPKSPQASIKWLLQKDKDRRKEVKLNERIIATSQGLLIRSVQGSDQGLYHCIATENSFKQTIAKINFKVLDSEMVAVVTDKWSPWTWASSVRALPFHPKDIMGAFSHSEMQMINQYCKDTRQQHQQGDESQKMRGDYGKLKALINSRKSRNRRNQLPES

SEQ ID NO: 201 - protein, 208 aa, Homo sapiens
MKLLPSVVLKLFLAAVLSALVTGESLERLRRGLAAGTSNPDPPTVSTDQLLPLGGGRDRKVRDLQEADLDLLRVTLSSKPQALATPNKEEHGKRKKKGKGLGKKRDPCLRKYKDFCIHGECKYVKELRAPSCICHPGYHGERCHGLSLPVENRLYTYDHTTILAVVAVVLSSVCLLVIVGLLMFRYHRRGGYDVENEEKVKLGMTNSH

SEQ ID NO: 202 - protein, 662 aa, Homo sapiens
MRPQILLLLALLTLGLAAQHQDKVPCKMVDKKVSCQVLGLLQVPSVLPPDTETLDLSGNQLRSILASPLGFYTALRHLDLSTNEISFLQPGAFQALTHLEHLSLAHNRLAMATALSAGGLGPLPRVTSLDLSGNSLYSGLLERLLGEAPSLHTLSLAENSLTRLTRHTFRDMPALEQLDLHSNVLMDIEDGAFEGLPRLTHLNLSRNSLTCISDFSLQQLRVLDLSCNSIEAFQTASQPQAEFQLTWLDLRENKLLHFPDLAALPRLIYLNLSNNLIRLPTGPPQDSKGIHAPSEGWSALPLSAPSGNASGRPLSQLLNLDLSYNEIELIPDSFLEHLTSLCFLNLSRNCLRTFEARRLGSLPCLMLLDLSHNALETLELGARALGSLRTLLLQGNALRDLPPYTFANLASLQRLNLQGNRVSPCGGPDEPGPSGCVAFSGITSLRSLSLVDNEIELLRAGAFLHTPLTELDLSSNPGLEVATGALGGLEASLEVLALQGNGLMVLQVDLPCFICLKRLNLAENRLSHLPAWTQAVSLEVLDLRNNSFSLLPGSAMGGLETSLRRLYLQGNPLSCCGNGWLAAQLHQGRVDVDATQDLICRFSSQEEVSLSHVRPEDCEKGGLKNINLIIILTFILVSAILLTTLAACCCVRRQKFNQQYKA

SEQ ID NO: 203 - protein, 1036 aa, Homo sapiens
MQPEEGTGWLLELLSEVQLQQYFLRLRDDLNVTRLSHFEYVKNEDLEKIGMGRPGQRRLWEAVKRRKALCKRKSWMSKVFSGKRLEAEFPPHHSQSTFRKTSPAPGGPAGEGPLQSLTCLIGEKDLRLLEKLGDGSFGVVRRGEWDAPSGKTVSVAVKCLKPDVLSQPEAMDDFIREVNAMHSLDHRNLIRLYGVVLTPPMKMVTELAPLGSLLDRLRKHQGHFLLGTLSRYAVQVAEGMGYLESKRFIHRDLAARNLLLATRDLVKIGDFGLMRALPQNDDHYVMQEHRKVPFAWCAPESLKTRTFSHASDTWMFGVTLWEMFTYGQEPWIGLNGSQILHKIDKEGERLPRPEDCPQDIYNVMVQCWAHKPEDRPTFVALRDFLLEAQPTDMRALQDFEEPDKLHIQMNDVITVIEGRAENYWWRGQNTRTLCVGPFPRNVVTSVAGLSAQDISQPLQNSFIHTGHGDSDPRHCWGFPDRIDELYLGNPMDPPDLLSVELSTSRPPQHLGGVKKPTYDPVSEDQDPLSSDFKRLGLRKPGLPRGLWLAKPSARVPGTKASRGSGAEVTLIDFGEEPVVPALRPCPPSLAQLAMDACSLLDETPPQSPTRALPRPLHPTPVVDWDARPLPPPPAYDDVAQDEDDFEICSINSTLVGAGVPAGPSQGQTNYAFVPEQARPPPPLEDNLFLPPQGGGKPPSSAQTAEIFQALQQECMRQLQAPGSPAPSPSPGGDDKPQVPPRVPIPPRPTRPHVQLSPAPPGEEETSQWPGPASPPRVPPREPLSPQGSRTPSPLVPPGSSPLPPRLSSSPGKTMPTTQSFASDPKYATPQVIQAPGAGGPCILPIVRDGKKVSSTHYYLLPERPSYLERYQRFLREAQSPEEPTPLPVPLLLPPPSTPAPAAPTATVRPMPQAALDPKANFSTNNSNPGARPPPPRATARLPQRGCPGDGPEAGRPADKIQMAMVHGVTTEECQAALQCHGWSVQRAAQYLKVEQLFGLGLRPRGECHKVLEMFDWNLEQAGCHLLGSWGPAHHKR

SEQ ID NO: 204 - protein, 364 aa, Homo sapiens
MAAISTSIPVISQPQFTAMNEPQCFYNESIAFFYNRSGKHLATEWNTVSKLVMGLGITVCIFIMLANLLVMVAIYVNRRFHFPIYYLMANLAAADFFAGLAYFYLMFNTGPNTRRLTVSTWLLRQGLIDTSLTASVANLLAIAIERHITVFRMQLHTRMSNRRVVVVIVVIWTMAIVMGAIPSVGWNCICDIENCSNMAPLYSDSYLVFWAIFNLVTFVVMVVLYAHIFGYVRQRTMRMSRHSSGPRRNRDTMMSLLKTVVIVLGAFIICWTPGLVLLLLDVCCPQCDVLAYEKFFLLLAEFNSAMNPIIYSYRDKEMSATFRQILCCQRSENPTGPTEGSDRSASSLNHTILAGVHSNDHSVV

SEQ ID NO: 205 - protein, 164 aa, Homo sapiens
MASPHQEPKPGDLIEIFRLGYEHWALYIGDGYVIHLAPPSEYPGAGSSSVFSVLSNSAEVKRGRLEDVVGGCCYRVNNSLDHEYQPRPVEVIISSAKEMVGQKMKYSIVSRNCEHFVAQLRYGKSRCKQVEKAKVEVGVATALGILVVAGCSFAIRRYQKKATA

SEQ ID NO: 206 - protein, 323 aa, Homo sapiens
MYHNSSQKRHWTFSSEEQLARLRADANRKFRCKAVANGKVLPNDPVFLEPHEEMTLCKYYEKRLLEFCSVFKPAMPRSVVGTACMYFKRFYLNNSVMEYHPRIIMLTCAFLACKVDEFNVSSPQFVGNLRESPLGQEKALEQILEYELLLIQQLNFHLIVHNPYRPFEGFLIDLKTRYPILENPEILRKTADDFLNRIALTDAYLLYTPSQIALTAILSSASRAGITMESYLSESLMLKENRTCLSQLLDIMKSMRNLVKKYEPPRSEEVAVLKQKLERCHSAELALNVITKKRKGYEDDDYVSKKSKHEEEEWTDDDLVESL

SEQ ID NO: 207 - protein, 710 aa, Homo sapiens
MLSFQYPDVYRDETAVQDYHGHKICDPYAWLEDPDSEQTKAFVEAQNKITVPFLEQCPIRGLYKERMTELYDYPKYSCHFKKGKRYFYFYNTGLQNQRVLYVQDSLEGEARVFLDPNILSDDGTVALRGYAFSEDGEYFAYGLSASGSDWVTIKFMKVDGAKELPDVLERVKFSCMAWTHDGKGMFYNSYPQQDGKSDGTETSTNLHQKLYYHVLGTDQSEDILCAEFPDEPKWMGGAELSDDGRYVLLSIREGCDPVNRLWYCDLQQESSGIAGILKWVKLIDNFEGEYDYVTNEGAVFTFKTNRQSPNYRVINIDFRDPEESKWKVLVPEHEKDVLEWIACVRSNFLVLCYLHDVKNILQLHDLTTGALLKTFPLDVGSIVGYSGQKKDTEIFYQFTSFLSPGIIYHCDLTKEELEPRVFREVTVKGIDASDYQTVQIFYPSKDGTKIPMFIVHKKSIKLDGSHPAFLYGYGGFNISITPNYSVSRLIFVRHMGGILAVANIRGGGEYGETWHKGGILANKQNCFDDFQCAAEYLIKEGYTSPKRLTINGGSNGGLLVAACANQRPDLFGCVIAQVGVMDMLKFHKYTIGHAWTTDYGCSDSKQHFEWLVKYSPLHNVKLPEADDIQYPSMLLLTADHDDRVVPLHSLKFIATLQYIVGRSRKQSNPLLIHVDTKAGHGAGKPTAKVIEEVSDMFAFIARCLNVDWIP

SEQ ID NO: 208 - protein, 1806 aa, Homo sapiens
MEPWSSRWKTKRWLWDFTVTTLALTFLFQAREVRGAAPVDVLKALDFHNSPEGISKTTGFCTNRKNSKGSDTAYRVSKQAQLSAPTKQLFPGGTFPEDFSILFTVKPKKGIQSFLLSIYNEHGIQQIGVEVGRSPVFLFEDHTGKPAPEDYPLFRTVNIADGKWHRVAISVEKKTVTMIVDCKKKTTKPLDRSERAIVDTNGITVFGTRILDEEVFEGDIQQFLITGDPKAAYDYCEHYSPDCDSSAPKAAQAQEPQIDEYAPEDIIEYDYEYGEAEYKEAESVTEGPTVTEETIAQTEANIVDDFQEYNYGTMESYQTEAPRHVSGTNEPNPVEEIFTEEYLTGEDYDSQRKNSEDTLYENKEIDGRDSDLLVDGDLGEYDFYEYKEYEDKPTSPPNEEFGPGVPAETDITETSINGHGAYGEKGQKGEPAVVEPGMLVEGPPGPAGPAGIMGPPGLQGPTGPPGDPGDRGPPGRPGLPGADGLPGPPGTMLMLPFRYGGDGSKGPTISAQEAQAQAILQQARIALRGPPGPMGLTGRPGPVGGPGSSGAKGESGDPGPQGPRGVQGPPGPTGKPGKRGRPGADGGRGMPGEPGAKGDRGFDGLPGLPGDKGHRGERGPQGPPGPPGDDGMRGEDGEIGPRGLPGEAGPRGLLGPRGTPGAPGQPGMAGVDGPPGPKGNMGPQGEPGPPGQQGNPGPQGLPGPQGPIGPPGEKGPQGKPGLAGLPGADGPPGHPGKEGQSGEKGALGPPGPQGPIGYPGPRGVKGADGVRGLKGSKGEKGEDGFPGFKGDMGLKGDRGEVGQIGPRGEDGPEGPKGRAGPTGDPGPSGQAGEKGKLGVPGLPGYPGRQGPKGSTGFPGFPGANGEKGARGVAGKPGPRGQRGPTGPRGSRGARGPTGKPGPKGTSGGDGPPGPPGERGPQGPQGPVGFPGPKGPPGPPGRMGCPGHPGQRGETGFQGKTGPPGPGGVVGPQGPTGETGPIGERGHPGPPGPPGEQGLPGAAGKEGAKGDPGPQGISGKDGPAGLRGFPGERGLPGAQGAPGLKGGEGPQGPPGPVGSPGERGSAGTAGPIGLPGRPGPQGPPGPAGEKGAPGEKGPQGPAGRDGVQGPVGLPGPAGPAGSPGEDGDKGEIGEPGQKGSKGDKGENGPPGPPGLQGPVGAPGIAGGDGEPGPRGQQGMFGQKGDEGARGFPGPPGPIGLQGLPGPPGEKGENGDVGPWGPPGPPGPRGPQGPNGADGPQGPPGSVGSVGGVGEKGEPGEAGNPGPPGEAGVGGPKGERGEKGEAGPPGAAGPPGAKGPPGDDGPKGNPGPVGFPGDPGPPGELGPAGQDGVGGDKGEDGDPGQPGPPGPSGEAGPPGPPGKRGPPGAAGAEGRQGEKGAKGEAGAEGPPGKTGPVGPQGPAGKPGPEGLRGIPGPVGEQGLPGAAGQDGPPGPMGPPGLPGLKGDPGSKGEKGHPGLIGLIGPPGEQGEKGDRGLPGTQGSPGAKGDGGIPGPAGPLGPPGPPGLPGPQGPKGNKGSTGPAGQKGDSGLPGPPGPPGPPGEVIQPLPILSSKKTRRHTEGMQADADDNILDYSDGMEEIFGSLNSLKQDIEHMKFPMGTQTNPARTCKDLQLSHPDFPDGEYWIDPNQGCSGDSFKVYCNFTSGGETCIYPDKKSEGVRISSWPKEKPGSWFSEFKRGKLLSYLDVEGNSINMVQMTFLKLLTASARQNFTYHCHQSAAWYDVSSGSYDKALRFLGSNDEEMSYDNNPFIKTLYDGCTSRKGYEKTVIEINTPKIDQVPIVDVMINDFGDQNQKFGFEVGPVCFLG

SEQ ID NO: 209 - protein, 669 aa, Homo sapiens
MTAAAGSAGRAAVPLLLCALLAPGGAYVLDDSDGLGREFDGIGAVSGGGATSRLLVNYPEPYRSQILDYLFKPNFGASLHILKVEIGGDGQTTDGTEPSHMHYALDENYFRGYEWWLMKEAKKRNPNITLIGLPWSFPGWLGKGFDWPYVNLQLTAYYVVTWIVGAKRYHDLDIDYIGIWNERSYNANYIKILRKMLNYQGLQRVKIIASDNLWESISASMLLDAELFKVVDVIGAHYPGTHSAKDAKLTGKKLWSSEDFSTLNSDMGAGCWGRILNQNYINGYMTSTIAWNLVASYYEQLPYGRCGLMTAQEPWSGHYVVESPVWVSAHTTQFTQPGWYYLKTVGHLEKGGSYVALTDGLGNLTIIIETMSHKHSKCIRPFLPYFNVSQQFATFVLKGSFSEIPELQVWYTKLGKTSERFLFKQLDSLWLLDSDGSFTLSLHEDELFTLTTLTTGRKGSYPLPPKSQPFPSTYKDDFNVDYPFFSEAPNFADQTGVFEYFTNIEDPGEHHFTLRQVLNQRPITWAADASNTISIIGDYNWTNLTIKCDVYIETPDTGGVFIAGRVNKGGILIRSARGIFFWIFANGSYRVTGDLAGWIIYALGRVEVTAKKWYTLTLTIKGHFASGMLNDKSLWTDIPVNFPKNGWAAIGTHSFEFAQFDNFLVEATR

SEQ ID NO: 210 - protein, 508 aa, Homo sapiens
MQRLLTPVKRILQLTRAVQETSLTPARLLPVAHQRFSTASAVPLAKTDTWPKDVGILALEVYFPAQYVDQTDLEKYNNVEAGKYTVGLGQTRMGFCSVQEDINSLCLTVVQRLMERIQLPWDSVGRLEVGTETIIDKSKAVKTVLMELFQDSGNTDIEGIDTTNACYGGTASLFNAANWMESSSWDGRYAMVVCGDIAVYPSGNARPTGGAGAVAMLIGPKAPLALERGLRGTHMENVYDFYKPNLASEYPIVDGKLSIQCYLRALDRCYTSYRKKIQNQWKQAGSDRPFTLDDLQYMIFHTPFCKMVQKSLARLMFNDFLSASSDTQTSLYKGLEAFGGLKLEDTYTNKDLDKALLKASQDMFDKKTKASLYLSTHNGNMYTSSLYGCLASLLSHHSAQELAGSRIGAFSYGSGLAASFFSFRVSQDAAPGSPLDKLVSSTSDLPKRLASRKCVSPEEFTEIMNQREQFYHKVNFSPPGDTNSLFPGTWYLERVDEQHRRKYARRPV

SEQ ID NO: 211 - protein, 548 aa, Homo sapiens
MNIEVVEVLTLNQEVAGPRNAQIQALYAEDGSLSADAPSEQVQQQGKHPGDPEAARQRFRQFRYKDMTGPREALDQLRELCHQWLQPKARSKEQILELLVLEQFLGALPVKLRTWVESQHPENCQEVVALVEGVTWMSEEEVLPAGQPAEGTTCCLEVTAQQEEKQEDAAICPVTVLPEEPVTFQDVAVDFSREEWGLLGPTQRTEYRDVMLETFGHLVSVGWETTLENKELAPNSDIPEEEPAPSLKVQESSRDCALSSTLEDTLQGGVQEVQDTVLKQMESAQEKDLPQKKHFDNRESQANSGALDTNQVSLQKIDNPESQANSGALDTNQVLLHKIPPRKRLRKRDSQVKSMKHNSRVKIHQKSCERQKAKEGNGCRKTFSRSTKQITFIRIHKGSQVCRCSECGKIFRNPRYFSVHKKIHTGERPYVCQDCGKGFVQSSSLTQHQRVHSGERPFECQECGRTFNDRSAISQHLRTHTGAKPYKCQDCGKAFRQSSHLIRHQRTHTGERPYACNKCGKAFTQSSHLIGHQRTHNRTKRKKKQPTS

SEQ ID NO: 212 - protein, 84 aa, Homo sapiens
MATMENKVICALVLVSMLALGTLAEAQTETCTVAPRERQNCGFPGVTPSQCANKGCCFDDTVRGVPWCFYPNTIDVPPEEECEF

SEQ ID NO: 213 - protein, 339 aa, Homo sapiens
MAMQMQLEANADTSVEEESFGPQPISRLEQCGINANDVKKLEEAGFHTVEAVAYAPKKELINIKGISEAKADKILAEAAKLVPMGFTTATEFHQRRSEIIQITTGSKELDKLLQGGIETGSITEMFGEFRTGKTQICHTLAVTCQLPIDRGGGEGKAMYIDTEGTFRPERLLAVAERYGLSGSDVLDNVAYARAFNTDHQTQLLYQASAMMVESRYALLIVDSATALYRTDYSGRGELSARQMHLARFLRMLLRLADEFGVAVVITNQVVAQVDGAAMFAADPKKPIGGNIIAHASTTRLYLRKGRGETRICKIYDSPCLPEAEAMFAINADGVGDAKD

SEQ ID NO: 214 - protein, 561 aa, Homo sapiens
MCGIWALFGSDDCLSVQCLSAMKIAHRGPDAFRFENVNGYTNCCFGFHRLAVVDPLFGMQPIRVKKYPYLWLCYNGEIYNHKKMQQHFEFEYQTKVDGEIILHLYDKGGIEQTICMLDGVFAFVLLDTANKKVFLGRDTYGVRPLFKAMTEDGFLAVCSEAKGLVTLKHSATPFLKVEPFLPGHYEVLDLKPNGKVASVEMVKYHHCRDEPLHALYDNVEKLFPGFEIETVKNNLRILFNNAVKKRLMTDRRIGCLLSGGLDSSLVAATLLKQLKEAQVQYPLQTFAIGMEDSPDLLAARKVADHIGSEHYEVLFNSEEGIQALDEVIFSLETYDITTVRASVGMYLISKYIRKNTDSVVIFSGEGSDELTQGYIYFHKAPSPEKAEEESERLLRELYLFDVLRADRTTAAHGLELRVPFLDHRFSSYYLSLPPEMRIPKNGIEKHLLRETFEDSNLIPKEILWRPKEAFSDGITSVKNSWFKILQEYVEHQVDDAMMANAAQKFPFNTPKTKEGYYYRQVFERHYPGRADWLSHYWMPKWINATDPSARTLTHYKSAVKA

SEQ ID NO: 215 - protein, 227 aa, Homo sapiens
MAWKSGGASHSELIHNLRKNGIIKTDKVFEVMLATDRSHYAKCNPYMDSPQSIGFQATISAPHMHAYALELLFDQLHEGAKALDVGSGSGILTACFARMVGCTGKVIGIDHIKELVDDSVNNVRKDDPTLLSSGRVQLVVGDGRMGYAEEAPYDAIHVGAAAPVVPQALIDQLKPGGRLILPVGPAGGNQMLEQYDKLQDGSIKMKPLMGVIYVPLTDKEKQWSRWK

SEQ ID NO: 216 - protein, 595 aa, Homo sapiens
MTMTLHTKASGMALLHQIQGNELEPLNRPQLKIPLERPLGEVYLDSSKPAVYNYPEGAAYEFNAAAAANAQVYGQTGLPYGPGSEAAAFGSNGLGGFPPLNSVSPSPLMLLHPPPQLSPFLQPHGQQVPYYLENEPSGYTVREAGPPAFYRPNSDNRRQGGRERLASTNDKGSMAMESAKETRYCAVCNDYASGYHYGVWSCEGCKAFFKRSIQGHNDYMCPATNQCTIDKNRRKSCQACRLRKCYEVGMMKGGIRKDRRGGRMLKHKRQRDDGEGRGEVGSAGDMRAANLWPSPLMIKRSKKNSLALSLTADQMVSALLDAEPPILYSEYDPTRPFSEASMMGLLTNLADRELVHMINWAKRVPGFVDLTLHDQVHLLECAWLEILMIGLVWRSMEHPVKLLFAPNLLLDRNQGKCVEGMVEIFDMLLATSSRFRMMNLQGEEFVCLKSIILLNSGVYTFLSSTLKSLEEKDHIHRVLDKITDTLIHLMAKAGLTLQQQHQRLAQLLLILSHIRHMSNKGMEHLYSMKCKNVVPLYDLLLEMLDAHRLHAPTSRGGASVEETDQSHLATAGSTSSHSLQKYYITGEAEGFPATV

SEQ ID NO: 217 - protein, 427 aa, Homo sapiens
MAVLAALLRSGARSRSPLLRRLVQEIRYVERSYVSKPTLKEVVIVSATRTPIGSFLGSLSLLPATKLGSIAIQGAIEKAGIPKEEVKEAYMGNVLQGGEGQAPTRQAVLGAGLPISTPCTTINKVCASGMKAIMMASQSLMCGHQDVMVAGGMESMSNVPYVMNRGSTPYGGVKLEDLIVKDGLTDVYNKIHMGSCAENTAKKLNIARNEQDAYAINSYTRSKAAWEAGKFGNEVIPVTVTVKGQPDVVVKEDEEYKRVDFSKVPKLKTVFQKENGTVTAANASTLNDGAAALVLMTADAAKRLNVTPLARIVAFADAAVEPIDFPIAPVYAASMVLKDVGLKKEDIAMWEVNEAFSLVVLANIKMLEIDPQKVNINGGAVSLGHPIGMSGARIVGHLTHALKQGEYGLASICNGGGGASAMLIQKL

SEQ ID NO: 218 - protein, 273 aa, Homo sapiens
MAAADGALPEAAALEQPAELPASVRASIERKRQRALMLRQARLAARPYSATAAAATGGMANVKAAPKIIDTGGGFILEEEEEEEQKIGKVVHQPGPVMEFDYVICEECGKEFMDSYLMNHFDLPTCDNCRDADDKHKLITKTEAKQEYLLKDCDLEKREPPLKFIVKKNPHHSQWGDMKLYLKLQIVKRSLEVWGSQEALEEAKEVRQENREKMKQKKFDKKVKELRRAVRSSVWKRETIVHQHEYGPEENLEDDMYRKTCTMCGHELTYEKM

SEQ ID NO: 219 - protein, 1227 aa, Homo sapiens
MDSFDLALLQEWDLESLCVYEPDRNALRRKERERRNQETQQDDGTFNSSYSLFSEPYKTNKGDELSNRIQNTLGNYDEMKDFLTDRTNQSHLVGVPKPGVPQTPVNKIDEHFVADSRAQNQPSSICSTTTSTPAAVPVQQSKRGTMGWQKAGHPPSDGQQRATQQGSLRTLLGDGVGRQQPRAKQVCNVEVGLQTQERPPAMAAKHSSSGHCVQNFPPSLASKPSLVQQKPTAYVRPMDGQDQAPDESPKLKSSSETSVHCTSYRGVPASKPEPARAKAKLSKFSIPKQGEESRSGETNSCVEEIIREMTWLPPLSAIQAPGKVEPTKFPFPNKDSQLVSSGHNNPKKGDAEPESPDNGTSNTSMLEDDLKLSSDEEENEQQAAQRTALRALSDSAVVQQPNCRTSVPSSKGSSSSSSSGTSSSSSDSESSSGSDSETESSSSESEGSKPPHFSSPEAEPASSNKWQLDKWLNKVNPHKPPILIQNESHGSESNQYYNPVKEDVQDCGKVPDVCQPSLREKEIKSTCKEEQRPRTANKAPGSKGVKQKSPPAAVAVAVSAAAPPPAVPCAPAENAPAPARRSAGKKPTRRTERTSAGDGANCHRPEEPAAADALGTSVVVPPEPTKTRPCGNNRASHRKELRSSVTCEKRRTRGLSRIVPKSKEFIETESSSSSSSSDSDLESEQEEYPLSKAQTVAASASSGNDQRLKEAAANGGSGPRAPVGSINARTTSDIAKELEEQFYTLVPFGRNELLSPLKDSDEIRSLWVKIDLTLLSRIPEHLPQEPGVLSAPATKDSESAPPSHTSDTPAEKALPKSKRKRKCDNEDDYREIKKSQGEKDSSSRLATSTSNTLSANHCNMNINSVAIPINKNEKMLRSPISPLSDASKHKYTSEDLTSSSRPNGNSLFTSASSSKKPKADSQLQPHGGDLTKAAHNNSENIPLHKSRPQTKPWSPGSNGHRDCKRQKLVFDDMPRSADYFMQEAKRMKHKADAMVEKFGKALNYAEAALSFIECGNAMEQGPMESKSPYYLMYSETVELIRYAMRLKTHSGPNATPEDKQLAALCYRCLALLYWRMFRLKRDHAVKYSKALIDYFKNSSKAAQAPSPWGASGKSTGTPSPISPNPFPGSSVGSQGSLSNASALSPSTIVSIPQRIHQMAANHVSITNSILHSYDYWEMADNLAKENREFFNDLDLLMGPVTLHSSMEHLVQYSQQGLHWLRNSAHLS

SEQ ID NO: 220 - protein, 680 aa, Homo sapiens
MLPQIPFLLLVSLNLVHGVFYAERYQMPTGIKGPLPNTKTQFFIPYTIKSKGIAVRGEQGTPGPPGPAGPRGHPGPSGPPGKPGYGSPGLQGEPGLPGPPGPSAVGKPGVPGLPGKPGERGPYGPKGDVGPAGLPGPRGPPGPPGIPGPAGISVPGKPGQQGPTGAPGPRGFPGEKGAPGVPGMNGQKGEMGYGAPGRPGERGLPGPQGPTGPSGPPGVGKRGENGVPGQPGIKGDRGFPGEMGPIGPPGPQGPPGERGPEGIGKPGAAGAPGQPGIPGTKGLPGAPGIAGPPGPPGFGKPGLPGLKGERGPAGLPGGPGAKGEQGPAGLPGKPGLTGPPGNMGPQGPKGIPGSHGLPGPKGETGPAGPAGYPGAKGERGSPGSDGKPGYPGKPGLDGPKGNPGLPGPKGDPGVGGPPGLPGPVGPAGAKGMPGHNGEAGPRGAPGIPGTRGPIGPPGIPGFPGSKGDPGSPGPPGPAGIATKGLNGPTGPPGPPGPRGHSGEPGLPGPPGPPGPPGQAVMPEGFIKAGQRPSLSGTPLVSANQGVTGMPVSAFTVILSKAYPAIGTPIPFDKILYNRQQHYDPRTGIFTCQIPGIYYFSYHVHVKGTHVWVGLYKNGTPVMYTYDEYTKGYLDQASGSAIIDLTENDQVWLQLPNAESNGLYSSEYVHSSFSGFLVAPM

SEQ ID NO: 221 - protein, 622 aa, Homo sapiens [sequence omitted]

SEQ ID NO: 222 - protein, 441 aa, Homo sapiens
MVPPKLHVLFCLCGCLAVVYPFDWQYINPVAHMKSSAWVNKIQVLMAAASFGQTKIPRGNGPYSVGCTDLMFDHTNKGTFLRLYYPSQDNDRLDTLWIPNKEYFWGLSKFLGTHWLMGNILRLLFGSMTTPANWNSPLRPGEKYPLVVFSHGLGAFRTLYSAIGIDLASHGFIVAAVEHRDRSASATYYFKDQSAAEIGDKSWLYLRTLKQEEETHIRNEQVRQRAKECSQALSLILDIDHGKPVKNALDLKFDMEQLKDSIDREKIAVIGHSFGGATVIQTLSEDQRFRCGIALDAWMFPLGDEVYSRIPQPLFFINSEYFQYPANIIKMKKCYSPDKERKMITIRGSVHQNFADFTFATGKIIGHMLKLKGDIDSNAAIDLSNKASLAFLQKHLGLHKDFDQWDCLIEGDDENLIPGTNINTTNQHIMLQNSSGIEKYN

SEQ ID NO: 223 - protein, 148 aa, Homo sapiens
MRGRELPLVLLALVLCLAPRGRAVPLPAGGGTVLTKMYPRGNHWAVGHLMGKKSTGESSSVSERGSLKQQLREYIRWEEAARNLLGLIEAKENRNHQPPQPKALGNQQPSWDSEDSSNFKDVGSKGKVGRLSAPGSQREGRNPQLNQQ

SEQ ID NO: 224 - protein, 491 aa, Homo sapiens
MELSVLLFLALLTGLLLLLVQRHPNTHDRLPPGPRPLPLLGNLLQMDRRGLLKSFLRFREKYGDVFTVHLGPRPVVMLCGVEAIREALVDKAEAFSGRGKIAMVDPFFRGYGVIFANGNRWKVLRRFSVTTMRDFGMGKRSVEERIQEEAQCLIEELRKSKGALMDPTFLFQSITANIICSIVFGKRFHYQDQEFLKMLNLFYQTFSLISSVFGQLFELFSGFLKYFPGAHRQVYKNLQEINAYIGHSVEKHRETLDPSAPKDLIDTYLLHMEKEKSNAHSEFSHQNLNLNTLSLFFAGTETTSTTLRYGFLLMLKYPHVAERVYREIEQVIGPHRPPELHDRAKMPYTEAVIYEIQRFSDLLPMGVPHIVTQHTSFRGYIIPKDTEVFLILSTALHDPHYFEKPDAFNPDHFLDANGALKKTEAFIPFSLGKRICLGEGIARAELFLFFTTILQNFSMASPVAPEDIDLTPQECGVGKIPPTYQIRFLPR

SEQ ID NO: 225 - protein, 359 aa, Homo sapiens
MVRPMLLLSLGLLAGLLPALAACPQNCHCHSDLQHVICDKVGLQKIPKVSEKTKLLNLQRNNFPVLAANSFRAMPNLVSLHLQHCQIREVAAGAFRGLKQLIYLYLSHNDIRVVRAGAFDDLTELTYLYLDHNKVTELPRGLLSPLVNLFILQLNNNKIRELRAGPFQGAKDLRWLYLSENALSSLQPGALDDVENLAKFHVDRNQLSSYPSAALSKLRVVEELKLSHNPLKSIPDNAFQSFGRYLETLWLDNTNLEKFSDGAFLGVTTLKHVHLENNRLNQLPSNFPFDSLETLALTNNPWKCTCQLRGLRRWLEAKASRPDATCASPAKFKGQHIRDTDAFRSCKFPTKRSKKAGRH

SEQ ID NO: 226 - protein, 276 aa, Homo sapiens
MLAWRDGELEAETSSSLFLLAMQVWMCGGRMEDIPCSRVGHIYRKYVPYKVPAGVSLARVRTLKRVAEVWMDEYAEYIYQRRPEYRHLSAGDVAVQKKLRSSLNCKSFKWFMTKIAWDLPKFYPPVEPPAAAWGEIRNVGTGLCADTKHGALGSPLRLEGCVRGRGEAAWNNMQVFTFTWREDIRPGDPQHTKKFCFDAISHTSPVTLYDCHSMKGNQLWKYRKDKTLYHPVSGSCMDCSESDHRIFMNTCNPSSLTQQWLFEHTNSTVLEKFNRN

SEQ ID NO: 227 - protein, 161 aa, Homo sapiens
MTLEELVACDNAAQKMQTVTAAVEELLVAAQRQDRLTVGVYESAKLMNVDPDSVVLCLLAIDEEEEDDIALQIHFTLIQSFCCDNDINIVRVSGNARLAQLLGEPAETQGTTEARDLHCLPFLQNPHTDAWKSHGLVEVASYCEESRGNNQWVPYISLQER

SEQ ID NO: 228 - protein, 281 aa, Homo sapiens
MASRGRRPEHGGPPELFYDETEARKYVRNSRMIDIQTRMAGRALELLYLPENKPCYLLDIGCGTGLSGSYLSDEGHYWVGLDISPAMLDEAVDREIEGDLLLGDMGQGIPFKPGTFDGCISISAVQWLCNANKKSENPAKRLYCFFASLFSVLVRGSRAVLQLYPENSEQLELITTQATKAGFSGGMVVDYPNSAKAKKFYLCLFSGPSTFIPEGLSENQDEVEPRESVFTNERFPLRMSRRGMVRKSRAWVLEKKERHRRQGREVRPDTQYTGRKRKPRF

SEQ ID NO: 229 - protein, 525 aa, Homo sapiens
MAAGGSGGRASCPPGVGVGPGTGGSPGPSANAAATPAPGNAAAAAAAAAAAAAAPGPTPPAPPGPGTDAQAAGAERAEEAAGPGAAALQREAAYNWQASKPTVQERFAFLFNNEVLCDVHFLVGKGLSSQRIPAHRFVLAVGSAVFDAMFNGGMATTSTEIELPDVEPAAFLALLKFLYSDEVQIGPETVMTTLYTAKKYAVPALEAHCVEFLKKNLRADNAFMLLTQARLFDEPQLASLCLENIDKNTADAITAEGFTDIDLDTLVAVLERDTLGIREVRLFNAVVRWSEAECQRQQLQVTPENRRKVLGKALGLIRFPLMTIEEFAAGPAQSGILVDREVVSLFLHFTVNPKPRVEFIDRPRCCLRGKECSINRFQQVESRWGYSGTSDRIRFSVNKRIFVVGFGLYGSIHGPTDYQVNIQIIHTDSNTVLGQNDTGFSCDGSASTFRVMFKEPVEVLPNVNYTACATLKGPDSHYGTKGLRKVTHESPTTGAKTCFTFCYAAGNNNGTSVEDGQIPEVIFYT

SEQ ID NO: 230 - protein, 933 aa, Homo sapiens
MTELKAKGPRAPHVAGGPPSPEVGSPLLCRPAAGPFPGSQTSDTLPEVSAIPISLDGLLFPRPCQGQDPSDEKTQDQQSLSDVEGAYSRAEATRGAGGSSSSPPEKDSGLLDSVLDTLLAPSGPGQSQPSPPACEVTSSWCLFGPELPEDPPAAPATQRVLSPLMSRSGCKVGDSSGTAAAHKVLPRGLSPARQLLLPASESPHWSGAPVKPSPQAAAVEVEEEDSSESEESAGPLLKGKPRALGGAAAGGGAAACPPGAAAGGVALVPKEDSRFSAPRVALVEQDAPMAPGRSPLATTVMDFIHVPILPLNHALLAARTRQLLEDESYDGGAGAASAFAPPRTSPCASSTPVAVGDFPDCAYPPDAEPKDDAYPLYSDFQPPALKIKEEEEGAEASARSPRSYLVAGANPAAFPDFPLGPPPPLPPRATPSRPGEAAVTAAPASASVSSASSSGSTLECILYKAEGAPPQQGPFAPPPCKAPGASGCLLPRDGLPSTSASAAAAGAAPALYPALGLNGLPQLGYQAAVLKEGLPQVYPPYLNYLRPDSEASQSPQYSFESLPQKICLICGDEASGCHYGVLTCGSCKVFFKRAMEGQHNYLCAGRNDCIVDKIRRKNCPACRLRKCCQAGMVLGGRKFKKFNKVRVVRALDAVALPQPLGVPNESQALSQRFTFSPGQDIQLIPPLINLLMSIEPDVIYAGHDNTKPDTSSSLLTSLNQLGERQLLSVVKWSKSLPGFRNLHIDDQITLIQYSWMSLMVFGLGWRSYKHVSGQMLYFAPDLILNEQRMKESSFYSLCLTMWQIPQEFVKLQVSQEEFLCMKVLLLLNTIPLEGLRSQTQFEEMRSSYIRELIKAIGLRQKGVVSSSQRFYQLTKLLDNLHDLVKQLHLYCLNTFIQSRALSVEFPEMMSEVIAAQLPKILAGMVKPLLFHKK

SEQ ID NO: 231 - protein, 186 aa, Homo sapiens
MDADSDVALDILITNVVCVFRTRCHLNLRKIALEGANVIYKRDVGKVLMKLRKPRITATIWSSGKIICTGATSEEEAKFGARRLARSLQKLGFQVIFTDFKVVNVLAVCNMPFEIRLPEFTKNNRPHASYEPELHPAVCYRIKSLRATLQIFSTGSITVTGPNVKAVATAVEQIYPFVFESRKEIL

SEQ ID NO: 232 - protein, 1744 aa, Homo sapiens
MRLLWGLIWASSFFTLSLQKPRLLLFSPSVVHLGVPLSVGVQLQDVPRGQVVKGSVFLRNPSRNNVPCSPKVDFTLSSERDFALLSLQVPLKDAKSCGLHQLLRGPEVQLVAHSPWLKDSLSRTTNIQGINLLFSSRRGHLFLQTDQPIYNPGQRVRYRVFALDQKMRPSTDTITVMVENSHGLRVRKKEVYMPSSIFQDDFVIPDISEPGTWKISARFSDGLESNSSTQFEVKKYVLPNFEVKITPGKPYILTVPGHLDEMQLDIQARYIYGKPVQGVAYVRFGLLDEDGKKTFFRGLESQTKLVNGQSHISLSKAEFQDALEKLNMGITDLQGLRLYVAAAIIEYPGGEMEEAELTSWYFVSSPFSLDLSKTKRHLVPGAPFLLQALVREMSGSPASGIPVKVSATVSSPGSVPEVQDIQQNTDGSGQVSIPIIIPQTISELQLSVSAGSPHPAIARLTVAAPPSGGPGFLSIERPDSRPPRVGDTLNLNLRAVGSGATFSHYYYMILSRGQIVFMNREPKRTLTSVSVFVDHHLAPSFYFVAFYYHGDHPVANSLRVDVQAGACEGKLELSVDGAKQYRNGESVKLHLETDSLALVALGALDTALYAAGSKSHKPLNMGKVFEAMNSYDLGCGPGGGDSALQVFQAAGLAFSDGDQWTLSRKRLSCPKEKTTRKKRNVNFQKAINEKLGQYASPTAKRCCQDGVTRLPMMRSCEQRAARVQQPDCREPFLSCCQFAESLRKKSRDKGQAGLQRALEILQEEDLIDEDDIPVRSFFPENWLWRVETVDRFQILTLWLPDSLTTWEIHGLSLSKTKGLCVATPVQLRVFREFHLHLRLPMSVRRFEQLELRPVLYNYLDKNLTVSVHVSPVEGLCLAGGGGLAQQVLVPAGSARPVAFSVVPTAAAAVSLKVVARGSFEFPVGDAVSKVLQIEKEGAIHREELVYELNPLDHRGRTLEIPGNSDPNMIPDGDFNSYVRVTASDPLDTLGSEGALSPGGVASLLRLPRGCGEQTMIYLAPTLAASRYLDKTEQWSTLPPETKDHAVDLIQKGYMRIQQFRKADGSYAAWLSRGSSTWLTAFVLKVLSLAQEQVGGSPEKLQETSNWLLSQQQADGSFQDLSPVIHRSMQGGLVGNDETVALTAFVTIALHHGLAVFQDEGAEPLKQRVEASISKASSFLGEKASAGLLGAHAAAITAYALTLTKAPADLRGVAHNNLMAMAQETGDNLYWGSVTGSQSNAVSPTPAPRNPSDPMPQAPALWIETTAYALLHLLLHEGKAEMADQAAAWLTRQGSFQGGFRSTQDTVIALDALSAYWIASHTTEERGLNVTLSSTGRNGFKSHALQLNNRQIRGLEEELQFSLGSKINVKVGGNSKGTLKVLRTYNVLDMKNTTCQDLQIEVTVKGHVEYTMEANEDYEDYEYDELPAKDDPDAPLQPVTPLQLFEGRRNRRRREAPKVVEEQESRVHYTVCIWRNGKVGLSGMAIADVTLLSGFHALRADLEKLTSLSDRYVSHFETEGPHVLLYFDSVPTSRECVGFEAVQEVPVGLVQPASATLYDYYNPERRCSVFYGAPSKSRLLATLCSAEVCQCAEGKCPRQRRALERGLQDEDGYRMKFACYYPRVEYGFQVKVLREDSRAAFRLFETKITQVLHFTKDVKAAANQMRNFLVRASCRLRLEPGKEYLIMGLDGATYDLEGHPQYLLDSNSWIEEMPSERLCRSTRQRAACAQLNDFLQEYGTQGCQV

SEQ ID NO: 233 - protein, 295 aa, Homo sapiens
MIEVLTTTDSQKLLHQLNALLEQESRCQPKVCGLRLIESAHDNGLRMTARLRDFEVKDLLSLTQFFGFDTETFSLAVNLLDRFLSKMKVQPKHLGCVGLSCFYLAVKSIEEERNVPLATDLIRISQYRFTVSDLMRMEKIVLEKVCWKVKATTAFQFLQLYYSLLQENLPLERRNSINFERLEAQLKACHCRIIFSKAKPSVLALSIIALEIQAQKCVELTEGIECLQKHSKINGRDLTFWQELVSKCLTEYSSNKCSKPNVQKLKWIVSGRTARQLKHSYYRITHLPTIPEMVP

SEQ ID NO: 234 - protein, 359 aa, Homo sapiens
MAAVSGLVRRPLREVSGLLKRRFHWTAPAALQVTVRDAINQGMDEELERDEKVFLLGEEVAQYDGAYKVSRGLWKKYGDKRIIDTPISEMGFAGIAVGAAMAGLRPICEFMTFNFSMQAIDQVINSAAKTYYMSGGLQPVPIVFRGPNGASAGVAAQHSQCFAAWYGHCPGLKVVSPWNSEDAKGLIKSAIRDNNPVVVLENELMYGVPFEFLPEAQSKDFLIPIGKAKIERQGTHITVVSHSRPVGHCLEAAAVLSKEGVECEVINMRTIRPMDMETIEASVMKTNHLVTVEGGWPQFGVGAEICARIMEGPAFNFLDAPAVRVTGADVPMPYAKILEDNSIPQVKDIIFAIKKTLNI

SEQ ID NO: 235 - protein, 420 aa, Homo sapiens
MEVPPRLSHVPPPLFPSAPATLASRSLSHWRPRPPRQLAPLLPSLAPSSARQGARRAQRHVTAQQPSRLAGGAAIKGGRRRRPDLFRRHFKSSSIQRSAAAAAATRTARQHPPADSSVTMEDMNEYSNIEEFAEGSKINASKNQQDDGKMFIGGLSWDTSKKDLTEYLSRFGEVVDCTIKTDPVTGRSRGFGFVLFKDAASVDKVLELKEHKLDGKLIDPKRAKALKGKEPPKKVFVGGLSPDTSEEQIKEYFGAFGEIENIELPMDTKTNERRGFCFITYTDEEPVKKLLESRYHQIGSGKCEIKVAQPKEVYRQQQQQQKGGRGAAAGGRGGTRGRGRGQGQNWNQGFNNYYDQGYGNYNSAYGGDQNYSGYGGYDYTGYNYGNYGYGQGYADYSGQQSTYGKASRGGGNHQNNYQPY

SEQ ID NO: 236 - protein, 211 aa, Homo sapiens
MDDAHESPSDKGGETGESDETAAVPGDPGATDTDGIPEETDGDADVDLKEAAAEEGELESQDVSDLTTVEREDSSLLNPAAKKLKIDTKEKKEKKQKVDEDEIQKMQILVSSFSEEQLNRYEMYRRSAFPKAAIKRLIQSITGTSVSQNVVIAMSGISKVFVGEVVEEALDVCEKWGEMPPLQPKHMREAVRRLKSKGQIPNSKHKKIIFF

SEQ ID NO: 237 - protein, 382 aa, Homo sapiens
  misc_feature (19)..(19): X = A, C, D, E, F, G, H, I, K, L, M, N, P, Q, R, S, T, V, W, or Y
MALQGISVVELSGLAPGRXCAMVLADFGARVVRVDRPGSRYDVSRLGRGKRSLVLDLKQPREPRAAASVQAVGCAAGALPPRCHGETPAGPRDSAAGKSKAYLCQAEWIWPVQESFCRLAGHDINYLALSGVLSKIGRSGENPYAPLNLVADFAGGGLMCALGIIMALFDRTRTDKGQVIDANMVEGTAYLSSFLWKTQKSSLWEAPRGQNMLDGGAPFYTTYRTADGEFMAVGAIEPQFYELLIKGLGLKSDELPNQMSTDDWPEMKKKFADVFAKKTKAEWCQIFDGTDACVTPVLTFEEVVHHDHNKERGSFITSEEQDVSPRLAPLLLNTPAIPSSKGDPFIGEHTEEILEEFGFSREEIYQLNSDKIIESNKVKASL

SEQ ID NO: 238 - protein, 254 aa, Homo sapiens
MDNYADLSDTELTTLLRRYNIPHGPVVGSTRRLYEKKIFEYETQRRRLSPPSSSAASSYSFSDLNSTRGDADMYDLPKKEDALLYQSKGYNDDYYEESYFTTRTYGEPESAGPSRAVRQSVTSFPDADAFHHQVHDDDLLSSSEEECKDRERPMYGRDSAYQSITHYRPVSASRSSLDLSYYPTSSSTSFMSSSSSSSSWLTRRAIRPENRAPGAGLGQDRQVPLWGQLLLFLVFVIVLFFIYHFMQAEEGNPF

SEQ ID NO: 239 - protein, 423 aa, Homo sapiens
MAMVVSSWRDPQDDVAGGNPGGPNPAAQAARGGGGGAGEQQQQAGSGAPHTPQTPGQPGAPATPGTAGDKGQGPPGSGQSQQHIECVVCGDKSSGKHYGQFTCEGCKSFFKRSVRRNLTYTCRANRNCPIDQHHRNQCQYCRLKKCLKVGMRREAVQRGRMPPTQPNPGQYALTNGDPLNGHCYLSGYISLLLRAEPYPTSRYGSQCMQPNNIMGIENICELAARLLFSAVEWARNIPFFPDLQITDQVSLLRLTWSELFVLNAAQCSMPLHVAPLLAAAGLHASPMSADRVVAFMDHIRIFQEQVEKLKALHVDSAEYSCLKAIVLFTSDACGLSDAAHIESLQEKSQCALEEYVRSQYPNQPSRFGKLLLRLPSLRTVSSSVIEQLFFVRLVGKTPIETLIRDMLLSGSSFNWPYMSIQCS

SEQ ID NO: 240 - protein, 536 aa, Homo sapiens
MKQSSNVPAFLSKLWTLVEETHTNEFITWSQNGQSFLVLDEQRFAKEILPKYFKHNNMASFVRQLNMYGFRKVVHIDSGIVKQERDGPVEFQHPYFKQGQDDLLENIKRKVSSSKPEENKIRQEDLTKIISSAQKVQIKQETIESRLSELKSENESLWKEVSELRAKHAQQQQVIRKIVQFIVTLVQNNQLVSLKRKRPLLLNTNGAQKKNLFQHIVKEPTDNHHHKVPHSRTEGLKPRERISDDIIIYDVTDDNADEENIPVIPETNEDVISDPSNCSQYPDIVIVEDDNEDEYAPVIQSGEQNEPARESLSSGSDGSSPLMSSAVQLNGSSSLTSEDPVTMMDSILNDNINLLGKVELLDYLDSIDCSLEDFQAMLSGRQFSIDPDLLVDLFTSSVQMNPTDYINNTKSENKGLETTKNNVVQPVSEEGRKSKSKPDKQLIQYTAFPLLAFLDGNPASSVEQASTTASSEVLSSVDKPIEVDELLDSSLDPEPTQSKLVRLEPLTEAEASEATLFYLCELAPAPLDSDMPLLDS

SEQ ID NO: 241 - protein, 616 aa, Homo sapiens
MNSPGGRGKKKGSGGASNPVPPRPPPPCLAPAPPAAGPAPPPESPHKRNLYYFSYPLFVGFALLRLVAFHLGLLFVWLCQRFSRALMAAKRSSGAAPAPASASAPAPVPGGEAERVRVFHKQAFEYISIALRIDEDEKAGQKEQAVEWYKKGIEELEKGIAVIVTGQGEQCERARRLQAKMMTNLVMAKDRLQLLEKMQPVLPFSKSQTDVYNDSTNLACRNGHLQSESGAVPKRKDPLTHTSNSLPRSKTVMKTGSAGLSGHHRAPSYSGLSMVSGVKQGSGPAPTTHKGTPKTNRTNKPSTPTTATRKKKDLKNFRNVDSNLANLIMNEIVDNGTAVKFDDIAGQDLAKQALQEIVILPSLRPELFTGLRAPARGLLLFGPPGNGKTMLAKAVAAESNATFFNISAASLTSKYVGEGEKLVRALFAVARELQPSIIFIDEVDSLLCERREGEHDASRRLKTEFLIEFDGVQSAGDDRVLVMGATNRPQELDEAVLRRFIKRVYVSLPNEETRLLLLKNLLCKQGSPLTQKELAQLARMTDGYSGSDLTALAKDAALGPIRELKPEQVKNMSASEMRNIRLSDFTESLKKIKRSVSPQTLEAYIRWNKDFGDTTV

SEQ ID NO: 242 - protein, 1979 aa, Homo sapiens
MSSWLGGLGSGLGQSLGQVGGSLASLTGQISNFTKDMLMEGTEEVEAELPDSRTKEIEAIHAILRSENERLKKLCTDLEEKHEASEIQIKQQSTSYRNQLQQKEVEISHLKARQIALQDQLLKLQSAAQSVPSGAGVPATTASSSFAYGISHHPSAFHDDDMDFGDIISSQQEINRLSNEVSRLESEVGHWRHIAQTSKAQGTDNSDQSEICKLQNIIKELKQNRSQEIDDHQHEMSVLQNAHQQKLTEISRRHREELSDYEERIEELENLLQQGGSGVIETDLSKIYEMQKTIQVLQIEKVESTKKMEQLEDKIKDINKKLSSAENDRDILRREQEQLNVEKRQIMEECENLKLECSKLQPSAVKQSDTMTEKERILAQSASVEEVFRLQQALSDAENEIMRLSSLNQDNSLAEDNLKLKMRIEVLEKEKSLLSQEKEELQMSLLKLNNEYEVIKSTATRDISLDSELHDLRLNLEAKEQELNQSISEKETLIAEIEELDRQNQEATKHMILIKDQLSKQQNEGDSIISKLKQDLNDEKKRVHQLEDDKMDITKELDVQKEKLIQSEVALNDLHLTKQKLEDKVENLVDQLNKSQESNVSIQKENLELKEHIRQNEEELSRIRNELMQSLNQDSNSNFKDTLLKEREAEVRNLKQNLSELEQLNENLKKVAFDVKMENEKLVLACEDVRHQLEECLAGNNQLSLEKNTIVETLKMEKGEIEAELCWAKKRLLEEANKYEKTIEELSNARNLNTSALQLEHEHLIKLNQKKDMEIAELKKNIEQMDTDHKETKDVLSSSLEEQKQLTQLINKKEIFIEKLKERSSKLQEELDKYSQALRKNEILRQTIEEKDRSLGSMKEENNHLQEELERLREEQSRTAPVADPKTLDSVTELASEVSQLNTIKEHLEEEIKHHQKIIEDQNQSKMQLLQSLQEQKKEMDEFRYQHEQMNATHTQLFLEKDEEIKSLQKTIEQIKTQLHEERQDIQTDNSDIFQETKVQSLNIENGSEKHDLSKAETERLVKGIKERELEIKLLNEKNISLTKQIDQLSKDEVGKLTQIIQQKDLEIQALHARISSTSHTQDVVYLQQQLQAYAMEREKVFAVLNEKTRENSHLKTEYHKMMDIVAAKEAALIKLQDENKKLSTRFESSGQDMFRETIQNLSRIIREKDIEIDALSQKCQTLLAVLQTSSTGNEAGGVNSHQFEELLQERDKLKQQVKKMEEWKQQVMTTVQNMQHESAQLQEELHQLQAQVLVDSDNNSKLQVDYTGLIQSYEQNETKLKNFGQELAQVQHSIGQLCNTKDLLLGKLDIISPQLSSASLLTPQSAECLRASKSEVLSESSELLQQELEELRKSLQEKDATIRTLQENNHRLSDSIAATSELERKEHEQTDSEIKQLKEKQDVLQKLLKEKDLLIKAKSDQLLSSNENFTNKVNENELLRQAVTNLKERILILEMDIGKLKGENEKIVETYRGKETEYQALQETNMKFSMMLREKEFECHSMKEKALAFEQLLKEKEQGKTGELNQLLNAVKSMQEKTVVFQQERDQVMLALKQKQMENTALQNEVQRLRDKEFRSNQELERLRNHLLESEDSYTREALAAEDREAKLRKKVTVLEEKLVSSSNAMENASHQASVQVESLQEQLNVVSKQRDETALQLSVSQEQVKQYALSLANLQMVLEHFQQEEKAMYSAELEKQKQLIAEWKKNAENLEGKVISLQECLDEANAALDSASRLTEQLDVKEEQIEELKRQNELRQEMLDDVQKKLMSLANSSEGKVDKVLMRNLFIGHFHTPKNQRHEVLRLMGSILGVRREEMEQLFHDDQGSVTRWMTGWLGGGSKSVPNTPLRPNQQSVVNSSFSELFVKFLETESHPSIPPPKLSVHDMKPLDSPGRRKRDTNAPESFKDTAESRSGRRTDVNPFLAPRSAAVPLINPAGLGPGGPGHLLLKPISDVLPTFTPLPALPDNSAGVVLKDLLKQ

SEQ ID NO: 243 - protein, 522 aa, Homo sapiens
MSSRPLESPPPYRPDEFKPNHYAPSNDIYGGEMHVRPMLSQPAYSFYPEDEILHFYKWTSPPGVIRILSMLIIVMCIAIFACVASTLAWDRGYGTSLLGGSVGYPYGGSGFGSYGSGYGYGYGYGYGYGGYTDPRAAKGFMLAMAAFCFIAALVIFVTSVIRSEMSRTRRYYLSVIIVSAILGIMVFIATIVYIMGVNPTAQSSGSLYGSQIYALCNQFYTPAATGLYVDQYLYHYCVVDPQEAIAIVLGFMIIVAFALIIFFAVKTRRKMDRYDKSNILWDKEHIYDEQPPNVEEWVKNVSAGTQDVPSPPSDYVERVDSPMAYSSNGKVNDKRFYPESSYKSTPVPEVVQELPLTSPVDDFRQPRYSSGGNFETPSKRAPAKGRAGRSKRTEQDHYETDYTTGGESCDELEEDWIREYPPITSDQQRQLYKRNFDTGLQEYKSLQSELDEINKELSRLDKELDDYREESEEYMAAADEYNRLKQVKGSADYKSKKNHCKQLKSKLSHIKKMVGDYDRQKT

SEQ ID NO: 244 - protein, 2181 aa, Homo sapiens
MMMMMMMKKMQHQRQQQADHANEANYARGTRLPLSGEGPTSQPNSSKQTVLSWQAAIDAARQAKAAQTMSTSAPPPVGSLSQRKRQQYAKSKKQGNSSNSRPARALFCLSLNNPIRRACISIVEWKPFDIFILLAIFANCVALAIYIPFPEDDSNSTNHNLEKVEYAFLIIFTVETFLKIIAYGLLLHPNAYVRNGWNLLDFVIVIVGLFSVILEQLTKETEGGNHSSGKSGGFDVKALRAFRVLRPLRLVSGVPSLQVVLNSIIKAMVPLLHIALLVLFVIIIYAIIGLELFIGKMHKTCFFADSDIVAEEDPAPCAFSGNGRQCTANGTECRSGWVGPNGGITNFDNFAFAMLTVFQCITMEGWTDVLYWVNDAIGWEWPWVYFVSLIILGSFFVLNLVLGVLSGEFSKEREKAKARGDFQKLREKQQLEEDLKGYLDWITQAEDIDPENEEEGGEEGKRNTSMPTSETESVNTENVSGEGENRGCCGSLWCWWRRRGAAKAGPSGCRRWGQAISKSKLSRRWRRWNRFNRRRCRAAVKSVTFYWLVIVLVFLNTLTISSEHYNQPDWLTQIQDIANKVLLALFTCEMLVKMYSLGLQAYFVSLFNRFDCFVVCGGITETILVELEIMSPLGISVFRCVRLLRIFKVTRHWTSLSNLVASLLNSMKSIASLLLLLFLFIIIFSLLGMQLFGGKFNFDETQTKRSTFDNFPQALLTVFQILTGEDWNAVMYDGIMAYGGPSSSGMIVCIYFIILFICGNYILLNVFLAIAVDNLADAESLNTAQKEEAEEKERKKIARKESLENKKNNKPEVNQIANSDNKVTIDDYREEDEDKDPYPPCDVPVGEEEEEEEEDEPEVPAGPRPRRISELNMKEKIAPIPEGSAFFILSKTNPIRVGCHKLINHHIFTNLILVFIMLSSAALAAEDPIRSHSFRNTILGYFDYAFTAIFTVEILLKMTTFGAFLHKGAFCRNYFNLLDMLVVGVSLVSFGIQSSAISVVKILRVLRVLRPLRAINRAKGLKHVVQCVFVAIRTIGNIMIVTTLLQFMFACIGVQLFKGKFYRCTDEAKSNPEECRGLFILYKDGDVDSPVVRERIWQNSDFNFDNVLSAMMALFTVSTFEGWPALLYKAIDSNGENIGPIYNHRVEISIFFIIYIIIVAFFMMNIFVGFVIVTFQEQGEKEYKNCELDKNQRQCVEYALKARPLRRYIPKNPYQYKFWYVVNSSPFEYMMFVLIMLNTLCLAMQHYEQSKMFNDAMDILNMVFTGVFTVEMVLKVIAFKPKGYFSDAWNTFDSLIVIGSIIDVALSEADPTESENVPVPTATPGNSEESNRISITFFRLFRVMRLVKLLSRGEGIRTLLWTFIKSFQALPYVALLIAMLFFIYAVIGMQMFGKVAMRDNNQINRNNNFQTFPQAVLLLFRCATGEAWQEIMLACLPGKLCDPESDYNPGEEYTCGSNFAIVYFISFYMLCAFLIINLFVAVIMDNFDYLTRDWSILGPHHLDEFKRIWSEYDPEAKGRIKHLDVVTLLRRIQPPLGFGKLCPHRVACKRLVAMNMPLNSDGTVMFNATLFALVRTALKIKTEGNLEQANEELRAVIKKIWKKTSMKLLDQVVPPAGDDEVTVGKFYATFLIQDYFRKFKKRKEQGLVGKYPAKNTTIALQAGLRTLHDIGPEIRRAISCDLQDDEPEETKREEEDDVFKRNGALLGNHVNHVNSDRRDSLQQTNTTHRPLHVQRPSIPPASDTEKPLFPPAGNSVCHNHHNHNSIGKQVPTSTNANLNNANMSKAAHGKRPSIGNLEHVSENGHHSSHKHDREPQRRSSVKRTRYYETYIRSDSGDEQLPTICREDPEIHGYFRDPHCLGEQEYFSSEECYEDDSSPTWSRQNYGYYSRYPGRNIDSERPRGYHHPQGFLEDDDSPVCYDSRRSPRRRLLPPTPASHRRSSFNFECLRRQSSQEEVPSSPIFPHRTALPLHLMQQQIMAVAGLDSSKAQKYSPSHSTRSWATPPATPPYRDWTPCYTPLIQVEQSEALDQVNGSLPSLHRSSWYTDEPDISYRTFTPASLTVPSSFRNKNSDKQRSADSLVEAVLISEGLGRYARDPKFVSATKHEIADACDLTIDEMESAASTLLNGNVRPRANGDVGPLSHRQDYELQDFGPGYSDEEPDPGRDEEDLADEMICITTL

SEQ ID NO: 245 - protein, 377 aa, Homo sapiens
MELSVLLFLALLTGLLLLLVQRHPNSHGTLPPGPRPLPLLGNLLQMDRRGLLKSFLRFREKYGDVFTVHLGPRPVVMLCGVEAIREALVDNAEAFSGRGKIVIMDPVYQGYGMLFANGNRWKVLRRFSVTTMRDFGMGKRSVEERIQDEAQCLIEELRKSKGALVDPTFLFHSITANIICSIIFGKRFHYQDQEFLKTLNLFCQSFLLISSISSQLFELFSGFLKYFPGAHRQVYKNLQEINAYIGHSVEKHRETLDPSAPRDLIDTYLLHMEKEKSNPHSEFSHQNLIINTLSLFFAGTETTSTTLRYGFLLMLKYPHVAERVYKEIEQVVGPHRPPALDDRAKMPYTEAVIREIQRFADLLPMGVPHIVTQHTSF

SEQ ID NO: 246 - protein, 280 aa, Homo sapiens
MAEKFDCHYCRDPLQGKKYVQKDGHHCCLKCFDKFCANTCVECRKPIGADSKEVHYKNRFWHDTCFRCAKCLHPLANETFVAKDNKILCNKCTTREDSPKCKGCFKAIVAGDQNVEYKGTVWHKDCFTCSNCKQVIGTGSFFPKGEDFYCVTCHETKFAKHCVKCNKAITSGGITYQDQPWHADCFVCVTCSKKLAGQRFTAVEDQYYCVDCYKNFVAKKCAGCKNPITGFGKGSSVVAYEGQSWHDYCFHCKKCSVNLANKRFVFHQEQVYCPDCAKKL

SEQ ID NO: 247 - protein, 267 aa, Homo sapiens
MASPSKGNDLFSPDEEGPAVVAGPGPGPGGAEGAAEERRVKVSSLPFSVEALMSDKKPPKEASPLPAESASAGATLRPLLLSGHGAREAHSPGPLVKPFETASVKSENSEDGAAWMQEPGRYSPPPRHMSPTTCTLRKHKTNRKPRTPFTTSQLLALERKFRQKQYLSIAERAEFSSSLNLTETQVKIWFQNRRAKAKRLQEAELEKLKMAAKPMLPSSFSLPFPISSPLQAASIYGASYPFHRPVLPIPPVGLYATPVGYGMYHLS

SEQ ID NO: 248 - protein, 387 aa, Homo sapiens
MPGHLQEGFGCVVTNRFDQLFDDESDPFEVLKAAENKKKEAGGGGVGGPGAKSAAQAAAQTNSNAAGKQLRKESQKDRKNPLPPSVGVVDKKEETQPPVALKKEGIRRVGRRPDQQLQGEGKIIDRRPERRPPRERRFEKPLEEKGEGGEFSVDRPIIDRPIRGRGGLGRGRGGRGRGMGRGDGFDSRGKREFDRHSGSDRSGLKHEDKRGGSGSHNWGTVKDELTDLDQSNVTEETPEGEEHHPVADTENKENEVEEVKEEGPKEMTLDEWKAIQNKDRAKVEFNIRKPNEGADGQWKKGFVLHKSKSEEAHAEDSVMDHHFRKPANDITSQLEINFGDLGRPGRGGRGGRGGRGRGGRPNRGSRTDKSSASAPDVDDPEAFPALA

SEQ ID NO: 249 - protein, 239 aa, Homo sapiens
MASTAVQLLGFLLSFLGMVGTLITTILPHWRRTAHVGTNILTAVSYLKGLWMECVWHSTGIYQCQIYRSLLALPQDLQAARALMVISCLLSGIACACAVIGMKCTRCAKGTPAKTTFAILGGTLFILAGLLCMVAVSWTTNDVVQNFYNPLLPSGMKFEIGQALYLGFISSSLSLIGGTLLCLSCQDEAPYRPYQAPPRATTTTANTAPAYQPPAAYKDNRAPSVTSATHSGYRLNDYV

SEQ ID NO: 250 - protein, 414 aa, Homo sapiens
MQTFLKGKRVGYWLSEKKIKKLNFQAFAELCRKRGMEVVQLNLSRPIEEQGPLDVIIHKLTDVILEADQNDSQSLELVHRFQEYIDAHPETIVLDPLPAIRTLLDRSKSYELIRKIEAYMEDDRICSPPFMELTSLCGDDTMRLLEKNGLTFPFICKTRVAHGTNSHEMAIVFNQEGLNAIQPPCVVQNFINHNAVLYKVFVVGESYTVVQRPSLKNFSAGTSDRESIFFNSHNVSKPESSSVLTELDKIEGVFERPSDEVIRELSRALRQALGVSLFGIDIIINNQTGQHAVIDINAFPGYEGVSEFFTDLLNHIATVLQGQSTAMAATGDVALLRHSKLLAEPAGGLVGERTCSASPGCCGSMMGQDAPWKAEADAGGTAKLPHQRLGCNAGVSPSFQQHCVASLATKASSQ

SEQ ID NO: 251 - protein, 1255 aa, Homo sapiens
MELAALCRWGLLLALLPPGAASTQVCTGTDMKLRLPASPETHLDMLRHLYQGCQVVQGNLELTYLPTNASLSFLQDIQEVQGYVLIAHNQVRQVPLQRLRIVRGTQLFEDNYALAVLDNGDPLNNTTPVTGASPGGLRELQLRSLTEILKGGVLIQRNPQLCYQDTILWKDIFHKNNQLALTLIDTNRSRACHPCSPMCKGSRCWGESSEDCQSLTRTVCAGGCARCKGPLPTDCCHEQCAAGCTGPKHSDCLACLHFNHSGICELHCPALVTYNTDTFESMPNPEGRYTFGASCVTACPYNYLSTDVGSCTLVCPLHNQEVTAEDGTQRCEKCSKPCARVCYGLGMEHLREVRAVTSANIQEFAGCKKIFGSLAFLPESFDGDPASNTAPLQPEQLQVFETLEEITGYLYISAWPDSLPDLSVFQNLQVIRGRILHNGAYSLTLQGLGISWLGLRSLRELGSGLALIHHNTHLCFVHTVPWDQLFRNPHQALLHTANRPEDECVGEGLACHQLCARGHCWGPGPTQCVNCSQFLRGQECVEECRVLQGLPREYVNARHCLPCHPECQPQNGSVTCFGPEADQCVACAHYKDPPFCVARCPSGVKPDLSYMPIWKFPDEEGACQPCPINCTHSCVDLDDKGCPAEQRASPLTSIVSAVVGILLVVVLGVVFGILIKRRQQKIRKYTMRRLLQETELVEPLTPSGAMPNQAQMRILKETELRKVKVLGSGAFGTVYKGIWIPDGENVKIPVAIKVLRENTSPKANKEILDEAYVMAGVGSPYVSRLLGICLTSTVQLVTQLMPYGCLLDHVRENRGRLGSQDLLNWCMQIAKGMSYLEDVRLVHRDLAARNVLVKSPNHVKITDFGLARLLDIDETEYHADGGKVPIKWMALESILRRRFTHQSDVWSYGVTVWELMTFGAKPYDGIPAREIPDLLEKGERLPQPPICTIDVYMIMVKCWMIDSECRPRFRELVSEFSRMARDPQRFVVIQNEDLGPASPLDSTFYRSLLEDDDMGDLVDAEEYLVPQQGFFCPDPAPGAGGMVHHRHRSSSTRSGGGDLTLGLEPSEEEAPRSPLAPSEGAGSDVFDGDLGMGAAKGLQSLPTHDPSPLQRYSEDPTVPLPSETDGYVAPLTCSPQPEYVNQPDVRPQPPSPREGPLPAARPAGATLERAKTLSPGKNGVVKDVFAFGGAVENPEYLTPQGGAAPQPHPPPAFSPAFDNLYYWDQDPPERGAPPSTFKGTPTAENPEYLGLDVPV

SEQ ID NO: 252 - protein, 393 aa, Homo sapiens [sequence omitted]

SEQ ID NO: 253 - protein, 639 aa, Homo sapiens
MSARGPAIGIDLGTTYSCVGVFQHGKVEIIANDQGNRTTPSYVAFTDTERLIGDAAKNQVAMNPTNTIFDAKRLIGRKFEDATVQSDMKHWPFRVVSEGGKPKVQVEYKGETKTFFPEEISSMVLTKMKEIAEAYLGGKVHSAVITVPAYFNDSQRQATKDAGTITGLNVLRIINEPTAAAIAYGLDKKGCAGGEKNVLIFDLGGGTFDVSILTIEDGIFEVKSTAGDTHLGGEDFDNRMVSHLAEEFKRKHKKDIGPNKRAVRRLRTACERAKRTLSSSTQASIEIDSLYEGVDFYTSITRARFEELNADLFRGTLEPVEKALRDAKLDKGQIQEIVLVGGSTRIPKIQKLLQDFFNGKELNKSINPDEAVAYGAAVQAAILIGDKSENVQDLLLLDVTPLSLGIETAGGVMTPLIKRNTTIPTKQTQTFTTYSDNQSSVLVQVYEGERAMTKDNNLLGKFDLTGIPPAPRGVPQIEVTFDIDANGILNVTAADKSTGKENKITITNDKGRLSKDDIDRMVQEAERYKSEDEANRDRVAAKNALESYTYNIKQTVEDEKLRGKISEQDKNKILDKCQEVINWLDRNQMAEKDEYEHKQKELERVCNPIISKLYQGGPGGGSGGGGSGASGGPTIEEVD

SEQ ID NO: 254 - protein, 1094 aa, Homo sapiens
MARPVRGGLGAPRRSPCLLLLWLLLLRLEPVTAAAGPRAPCAAACTCAGDSLDCGGRGLAALPGDLPSWTRSLNLSYNKLSEIDPAGFEDLPNLQEVYLNNNELTAVPSLGAASSHVVSLFLQHNKIRSVEGSQLKAYLSLEVLDLSLNNITEVRNTCFPHGPPIKELNLAGNRIGTLELGAFDGLSRSLLTLRLSKNRITQLPVRAFKLPRLTQLDLNRNRIRLIEGLTFQGLNSLEVLKLQRNNISKLTDGAFWGLSKMHVLHLEYNSLVEVNSGSLYGLTALHQLHLSNNSIARIHRKGWSFCQKLHELVLSFNNLTRLDEESLAELSSLSVLRLSHNSISHIAEGAFKGLRSLRVLDLDHNEISGTIEDTSGAFSGLDSLSKLTLFGNKIKSVAKRAFSGLEGLEHLNLGGNAIRSVQFDAFVKMKNLKELHISSDSFLCDCQLKWLPPWLIGRMLQAFVTATCAHPESLKGQSIFSVPPESFVCDDFLKPQIITQPETTMAMVGKDIRFTCSAASSSSSPMTFAWKKDNEVLTNADMENFVHVHAQDGEVMEYTTILHLRQVTFGHEGRYQCVITNHFGSTYSHKARLTVNVLPSFTKTPHDITIRTTTMARLECAATGHPNPQIAWQKDGGTDFPAARERRMHVMPDDDVFFITDVKIDDAGVYSCTAQNSAGSISANATLTVLETPSLVVPLEDRVVSVGETVALQCKATGNPPPRITWFKGDRPLSLTERHHLTPDNQLLVVQNVVAEDAGRYTCEMSNTLGTERAHSQLSVLPAAGCRKDGTTVGIFTIAVVSSIVLTSLVWVCIIYQTRKKSEEYSVTNTDETVVPPDVPSYLSSQGTLSDRQETVVRTEGAGPQANGHIESNGVCPRDASHFPEPDTHSVACRQPKLCAGSAYHKEPWKAIEKAEGTPGPHKMEHGGRVVCSDCNTEVDCYSRGQAFHPQPVSRDSAQPSAPNGPEPGGSDQEHSPHHQCSRTAAGSCPECQGSLYPSNHDRMLTAVKKKPMASLDGKGDSSWTLARLYHPDSTELQPASSLTSGSPERAEAQYLLVSNGHLPKACDASPESTPLTGQLPGKQRVPLLLAPKS

SEQ ID NO: 255 - protein, 474 aa, Homo sapiens
MATNWGSLLQDKQQLEELARQAVDRALAEGVLLRTSQEPTSSEVVSYAPFTLFPSLVPSALLEQAYAVQMDFNLLVDAVSQNAAFLEQTLSSTIKQDDFTARLFDIHKQVLKEGIAQTVFLGLNRSDYMFQRSADGSPALKQIEINTISASFGGLASRTPAVHRHVLSVLSKTKEAGKILSNNPSKGLALGIAKAWELYGSPNALVLLIAQEKERNIFDQRAIENELLARNIHVIRRTFEDISEKGSLDQDRRLFVDGQEIAVVYFRDGYMPRQYSLQNWEARLLLERSHAAKCPDIATQLAGTKKVQQELSRPGMLEMLLPGQPEAVARLRATFAGLYSLDVGEEGDQAIAEALAAPSRFVLKPQREGGGNNLYGEEMVQALKQLKDSEERASYILMEKIEPEPFENCLLRPGSPARVVQCISELGIFGVYVRQEKTLVMNKHVGHLLRTKAIEHADGGVAAGVAVLDNPYPV

SEQ ID NO: 256 - protein, 96 aa, Homo sapiens
MWIYSKLSKRTVFRKGKTRTQKTLGITTTPKCFRLQEITIHVFAGGHTIFPYYLVQNDSSLPKSFFSNHDFPIYFGPMQSHSLWPIVSLPTTPLGG

SEQ ID NO: 257 - protein, 3256 aa, Homo sapiens
MWPTRRLVTIKRSGVDGPHFPLSLSTCLFGRGIECDIRIQLPVVSKQHCKIEIHEQEAILHNFSSTNPTQVNGSVIDEPVRLKHGDVITIIDRSFRYENESLQNGRKSTEFPRKIREQEPARRVSRSSFSSDPDEKAQDSKAYSKITEGKVSGNPQVHIKNVKEDSTADDSKDSVAQGTTNVHSSEHAGRNGRNAADPISGDFKEISSVKLVSRYGELKSVPTTQCLDNSKKNESPFWKLYESVKKELDVKSQKENVLQYCRKSGLQTDYATEKESADGLQGETQLLVSRKSRPKSGGSGHAVAEPASPEQELDQNKGKGRDVESVQTPSKAVGASFPLYEPAKMKTPVQYSQQQNSPQKHKNKDLYTTGRRESVNLGKSEGFKAGDKTLTPRKLSTRNRTPAKVEDAADSATKPENLSSKTRGSIPTDVEVLPTETEIHNEPFLTLWLTQVERKIQKDSLSKPEKLGTTAGQMCSGLPGLSSVDINNFGDSINESEGIPLKRRRVSFGGHLRPELFDENLPPNTPLKRGEAPTKRKSLVMHTPPVLKKIIKEQPQPSGKQESGSEIHVEVKAQSLVISPPAPSPRKTPVASDQRRRSCKTAPASSSKSQTEVPKRGGERVATCLQKRVSISRSQHDILQMICSKRRSGASEANLIVAKSWADVVKLGAKQTQTKVIKHGPQRSMNKRQRRPATPKKPVGEVHSQFSTGHANSPCTIIIGKAHTEKVHVPARPYRVLNNFISNQKMDFKEDLSGIAEMFKTPVKEQPQLTSTCHIAISNSENLLGKQFQGTDSGEEPLLPTSESFGGNVFFSAQNAAKQPSDKCSASPPLRRQCIRENGNVAKTPRNTYKMTSLETKTSDTETEPSKTVSTVNRSGRSTEFRNIQKLPVESKSEETNTEIVECILKRGQKATLLQQRREGEMKEIERPFETYKENIELKENDEKMKAMKRSRTWGQKCAPMSDLTDLKSLPDTELMKDTARGQNLLQTQDHAKAPKSEKGKITKMPCQSLQPEPINTPTHTKQQLKASLGKVGVKEELLAVGKFTRTSGETTHTHREPAGDGKSIRTFKESPKQILDPAARVTGMKKWPRTPKEEAQSLEDLAGFKELFQTPGPSEESMTDEKTTKIACKSPPPESVDTPTSTKQWPKRSLRKADVEEEFLALRKLTPSAGKAMLTPKPAGGDEKDIKAFMGTPVQKLDLAGTLPGSKRQLQTPKEKAQALEDLAGFKELFQTPGHTEELVAAGKTTKIPCDSPQSDPVDTPTSTKQRPKRSIRKADVEGELLACRNLMPSAGKAMHTPKPSVGEEKDIIIFVGTPVQKLDLTENLTGSKRRPQTPKEEAQALEDLTGFKELFQTPGHTEEAVAAGKTTKMPCESSPPESADTPTSTRRQPKTPLEKRDVQKELSALKKLTQTSGETTHTDKVPGGEDKSINAFRETAKQKLDPAASVTGSKRHPKTKEKAQPLEDLAGWKELFQTPVCTDKPTTHEKTTKIACRSQPDPVDTPTSSKPQSKRSLRKVDVEEEFFALRKRTPSAGKAMHTPKPAVSGEKNIYAFMGTPVQKLDLTENLTGSKRRLQTPKEKAQALEDLAGFKELFQTRGHTEESMTNDKTAKVACKSSQPDLDKNPASSKRRLKTSLGKVGVKEELLAVGKLTQTSGETTHTHTEPTGDGKSMKAFMESPKQILDSAASLTGSKRQLRTPKGKSEVPEDLAGFIELFQTPSHTKESMTNEKTTKVSYRASQPDLVDTPTSSKPQPKRSLRKADTEEEFLAFRKQTPSAGKAMHTPKPAVGEEKDINTFLGTPVQKLDQPGNLPGSNRRLQTRKEKAQALEELTGFRELFQTPCTDNPTADEKTTKKILCKSPQSDPADTPTNTKQRPKRSLKKADVEEEFLAFRKLTPSAGKAMHTPKAAVGEEKDINTFVGTPVEKLDLLGNLPGSKRRPQTPKEKAKALEDLAGFKELFQTPGHTEESMTDDKITEVSCKSPQPDPVKTPTSSKQRLKISLGKVGVKEEVLPVGKLTQTSGKTTQTHRETAGDGKSIKAFKESAKQMLDPANYGTGMERWPRTPKEEAQSLEDLAGFKELFQTPDHTEESTTDDKTTKIACKSPPPESMDTPTSTRRRPKTPLGKRDIVEELSALKQLTQTTHTDKVPGDEDKGINVFRETAKQKLDPAASVTGSKRQPRTPKGKAQPLEDLAGLKELFQTPVCTDKPTTHEKTTKIACRSPQPDPVGTPTIFKPQSKRSLRKADVEEESLALRKRTPSVGKAMDTPKPAGGDEKDMKAFMGTPVQKLDLPGNLPGSKRWPQTPKEKAQALEDLAGFKELFQTPGTDKPTTDEKTTKIACKSPQPDPVDTPASTKQRPKRNLRKADVEEEFLALRKRTPSAGKAMDTPKPAVSDEKNINTFVETPVQKLDLLGNLPGSKRQPQTPKEKAEALEDLVGFKELFQTPGHTEESMTDDKITEVSCKSPQPESFKTSRSSKQRLKIPLVKVDMKEEPLAVSKLTRTSGETTQTHTEPTGDSKSIKAFKESPKQILDPAASVTGSRRQLRTRKEKARALEDLVDFKELFSAPGHTEESMTIDKNTKIPCKSPPPELTDTATSTKRCPKTRPRKEVKEELSAVERLTQTSGQSTHTHKEPASGDEGIKVLKQRAKKKPNPVEEEPSRRRPRAPKEKAQPLEDLAGFTELSETSGHTQESLTAGKATKIPCESPPLEVVDTTASTKRHLRTRVQKVQVKEEPSAVKFTQTSGETTDADKEPAGEDKGIKALKESAKQTPAPAASVTGSRRRPRAPRESAQAIEDLAGFKDPAAGHTEESMTDDKTTKIPCKSSPELEDTATSSKRRPRTRAQKVEVKEELLAVGKLTQTSGETTHTDKEPVGEGKGTKAFKQPAKRNVDAEDVIGSRRQPRAPKEKAQPLEDLASFQELSQTPGHTEELANGAADSFTSAPKQTPDSGKPLKISRRVLRAPKVEPVGDVVSTRDPVKSQSKSNTSLPPLPFKRGGGKDGSVTGTKRLRCMPAPEEIVEELPASKKQRVAPRARGKSSEPVVIMKRSLRTSAKRIEPAEELNSNDMKTNKEEHKLQDSVPENKGISLRSRRQDKTEAEQQITEVFVLAERIEINRNEKKPMKTSPEMDIQNPDDGARKPIPRDKVTENKRCLRSARQNESSQPKVAEESGGQKSAKVLMQNQKGKGEAGNSDSMCLRSRKTKSQPAASTLESKSVQRVTRSVKRCAENPKKAEDNVCVKKITTRSHRDSEDI

SEQ ID NO: 258 - protein, 160 aa, Homo sapiens
MSEVRPLSRDILMETLLYEQLLEPPTMEVLGMTDSEEDLDPMEDFDSLECMEGSDALALRLACIGDEMDVSLRAPRLAQLSEVAMHSLGLAFIYDQTEDIRDVLRSFMDGFTTLKENIMRFWRSPNPGSWVSCEQVLLALLLLLALLLPLLSGGLHLLLK

SEQ ID NO: 259 - protein, 1844 aa, Homo sapiens
MTTRFTDELMEQGLTYKVLTLVSQIDVNNEFEKLQRERGLGSEKHRKEVSDLIKECRQSLAESLFAWACQSPLGKEDTLLLIGHLERVTVEANGSLDAVNLALLMALLYCFDISFIEQSTEERDDMIHQLPLLTEKQYIATIHSRLQDSQLWKLPGLQATVRLAWALALRGISQLPDVTALAEFTEADEAMAELAIADNVFLFLMESVVVSEYFYQEEFYIRRVHNLITDFLALMPMKVKQLRNRADEDARMIHMSMQMGNEPPISLRRDLEHLMLLIGELYKKNPFHLELALEYWCPTEPLQTPTIMGSYLGVAHQRPPQRQVVLSKFVRQMGDLLPPTIYIPYLKMLQGLANGPQCAHYCFSLLKVNGSSHVENIQGAGGSPVSWEHFFHSLMLYHEHLRKDLPSADSVQYRHLPSRGITQKEQDGLIAFLQLTSTIITWSENARLALCEHPQWTPVVVILGLLQCSIPPVLKAELLKTLAAFGKSPEIAASLWQSLEYTQILQTVRIPSQRQAIGIEVELNEIESRCEEYPLTRAFCQLISTLVESSFPSNLGAGLRPPGFDPYLQFLRDSVFLRFRTRAYRRAAEKWEVAEVVLEVFYKLLRDYEPQLEDFVDQFVELQGEEIIAYKPPGFSLMYHLLNESPMLELALSLLEEGVKQLDTYAPFPGKKHLEKAVQHCLALLNLTLQKENLFMDLLRESQLALIVCPLEQLLQGINPRTKKADNVVNIARYLYHGNTNPELAFESAKILCCISCNSNIQIKLVGDFTHDQSISQKLMAGFVECLDCEDAEEFVRLEEGSELEKKLVAIRHETRIHILNLLITSLECNPPNLALYLLGFELKKPVSTTNLQDPGVLGCPRTCLHAILNILEKGTEGRTGPVAVRESPQLAELCYQVIYQLCACSDTSGPTMRYLRTSQDFLFSQLQYLPFSNKEYEISMLNQMSWLMKTASIELRVTSLNRQRSHTQRLLHLLLDDMPVKPYSDGEGGIEDENRSVSGFLHFDTATKVRRKILNILDSIDFSQEIPEPLQLDFFDRAQIEQVIANCEHKNLRGQTVCNVKLLHRVLVAEVNALQGMAAIGQRPLLMEEISTVLQYVVGRNKLLQCLHAKRHALESWRQLVEIILTACPQDLIQAEDRQLIIRDILQDVHDKILDDEAAQELMPVVAGAVFTLTAHLSQAVLTEQKETSVLGPAEAHYAFMLDSCFTSPPPEENPLVGFASIGDSSLYIILKKLLDFILKTGGGFQRVRTHLYGSLLYYLQIAQRPDEPDTLEAAKKTMWERLTAPEDVFSKLQRENIAIIESYGAALMEVVCRDACDGHEIGRMLALALLDRIVSVDKQQQWLLYLSNSGYLKVLVDSLVEDDRTLQSLLTPQPPLLKALYTYESKMAFLTRVAKIQQGALELLRSGVIVRLAQCQVYDMRPETDPQSMFGMRDPPMFIPTPVDRYRQILLPALQLCQVILTSSMAQHLQAAGQVLQFLISHSDTIQAILRCQDVSAGSLQELALLTGIISKAALPGILSELDVDVNEGSLMELQGHIGRFQRQCLGLLSRFGGSDRLRQFKFQDDNVEGDKVSKKDEIELAMQQICANVMEYCQSLMLQSSPTFQHAVCLFTPSLSETVNRDGPRQDTQAPVVPYWRLPGLGIIIYLLKQSANDFFSYYDSHRQSVSKLQNVEQLPPDEIKELCQSVMPAGVDKISTAQKYVLARRRLVKVINNRAKLLSLCSFIIETCLFILWRHLEYYLLHCMPTDSQDSLFASRTLFKSRRLQDSFASETNLDFRSGLAIVSQHDLDQLQADAINAFGESLQKKLLDIEGLYSKVRSRYSFIQALVRRIRGLLRISRN

SEQ ID NO: 260 - protein, 1299 aa, Homo sapiens
MAAETQTLNFGPEWLRALSSGGSITSPPLSPALPKYKLADYRYGREEMLALFLKDNKIPSDLLDKEFLPILQEEPLPPLALVPFTEEEQRNFSMSVNSAAVLRLTGRGGGGTVVGAPRGRSSSRGRGRGRGECGFYQRSFDEVEGVFGRGGGREMHRSQSWEERGDRRFEKPGRKDVGRPNFEEGGPTSVGRKHEFIRSESENWRIFREEQNGEDEDGGWRLAGSRRDGERWRPHSPDGPRSAGWREHMERRRRFEFDFRDRDDERGYRRVRSGSGSIDDDRDSLPEWCLEDAEEEMGTFDSSGAFLSLKKVQKEPIPEEQEMDFRPVDEGEECSDSEGSHNEEAKEPDKTNKKEGEKTDRVGVEASEETPQTSSSSARPGTPSDHQSQEASQFERKDEPKTEQTEKAEEETRMENSLPAKVPSRGDEMVADVQQPLSQIPSDTASPLLILPPPVPNPSPTLRPVETPVVGAPGMGSVSTEPDDEEGLKHLEQQAEKMVAYLQDSALDDERLASKLQEHRAKGVSIPLMHEAMQKWYYKDPQGEIQGPFNNQEMAEWFQAGYFTMSLLVKRACDESFQPLGDIMKMWGRVPFSPGPAPPPHMGELDQERLTRQQELTALYQMQHLQYQQFLIQQQYAQVLAQQQKAALSSQQQQQLALLLQQFQTLKMRISDQNIIPSVTRSVSVPDTGSIWELQPTASQPTVWEGGSVWDLPLDTTTPGPALEQLQQLEKAKAAKLEQERREAEMRAKREEEERKRQEELRRQQEEILRRQQEEERKRREEEELARRKQEGALRRQREQEIALRRQREEEERQQQEEALRRLEERRREEEERRKQEELLRKQEEEAAKWAREEEEAQRRLEENRLRMEEEAARLRHEEEERKRKELEVQRQKELMRQRQQQQEALRRLQQQQQQQQLAQMKLPSSSTWGQQSNTTACQSQATLSLAEIQKLEEERERQLREEQRRQQRELMKALQQQQQQQQQKLSGWGNVSKPSGTTKSLLEIQQEEARQMQKQQQQQQQHQQPNRARNNTHSNLHTSIGNSVWGSINTGPPNQWASDLVSSIWSNADTKNSNMGFWDDAVKEVGPRNSTNKNKNNASLSKSVGVSNRQNKKVEEEEKLLKLFQGVNKAQDGFTQWCEQMLHALNTANNLGVPTFVSFLKEVESPYEVHDYIRAYLGDTSEAKEFAKQFLERRAKQKANQQRQQQQLPQQQQQQPPQQPPQQPQQQDSVWGMNHSTLHSVFQTNQSNNQQSNFEAVQSGKKKKKQKMVRADPSLLGFSVNASSERLNMGEIETLDDY

SEQ ID NO: 261 - protein, 107 aa, Homo sapiens
MSGCRVFIGRLNPAAREKDVERFFKGYGRIRDIDLKRGFGFVEFEDPRDADDAVYELDGKELCSERVTIEHARARSRGGRGRGRYSDRFSSRRPRNDRRYVKGGWLH

SEQ ID NO: 262 - protein, 184 aa, Homo sapiens [sequence omitted]

SEQ ID NO: 263 - protein, 72 aa, Homo sapiens
MSSKTASTNNIAQARRTVQQLRLEASIERIKVSKASADLMSYCEEHARSDPLLIGIPTSENPFKDKKTCIIL

SEQ ID NO: 264 - protein, 462 aa, Homo sapiens
MKTRRTTRLQQQHSEQPPLQPSPVTTRRGLRDSHSSEEDEASSQTDLSQTISKKTVRSIQEAPVSEDLVIRLRRPPLRCPRYEATSVQQKVNFSEEGETEEDDQDSSHSSVTTVKARSRDSDESGDKTTRSSSQYIESFWQSSQSQNFTAHDKQRSVLSSGYQKTPQEWAPQTARIRTRMQNDSILKSELGNQSPSTSSRQVTGQPQNASFVKRNRWWLLPLIAALASGSFWFFSTPEVETTAVQEFQNQMNQLKNKYQGQDEKLWKRSQTFLEKHLNSSHPRSQPAILLLTAARDAEEALRCLSEQIADAYSSFRSVRAIRIDGTDKATQDSDTVKLEVDQELSNGFKNGQNAAVVHRFESFPAGSTLIFYKYCDHENAAFKDVALVLTVLLEEETLGTSLGLKEVEEKVRDFLKVKFTNSNTPNSYNHMDPDKLNGLWSRISHLVLPVQPENALKRGICL

SEQ ID NO: 265 - protein, 192 aa, Homo sapiens [sequence omitted]

SEQ ID NO: 266 - protein, 1838 aa, Homo sapiens
MDVHTRWKARSALRPGAPLLPPLLLLLLWAPPPSRAAQPADLLKVLDFHNLPDGITKTTGFCATRRSSKGPDVAYRVTKDAQLSAPTKQLYPASAFPEDFSILTTVKAKKGSQAFLVSIYNEQGIQQIGLELGRSPVFLYEDHTGKPGPEDYPLFRGINLSDGKWHRIALSVHKKNVTLILDCKKKTTKFLDRSDHPMIDINGIIVFGTRILDEEVFEGDIQQLLFVSDHRAAYDYCEHYSPDCDTAVPDTPQSQDPNPDEYYTEGDGEGETYYYEYPYYEDPEDLGKEPTPSKKPVEAAKETTEVPEELTPTPTEAAPMPETSEGAGKEEDVGIGDYDYVPSEDYYTPSPYDDLTYGEGEENPDQPTDPGAGAEIPTSTADTSNSSNPAPPPGEGADDLEGEFTEETIRNLDENYYDPYYDPTSSPSEIGPGMPANQDTIYEGIGGPRGEKGQKGEPAIIEPGMLIEGPPGPEGPAGLPGPPGTMGPTGQVGDPGERGPPGRPGLPGADGLPGPPGTMLMLPFRFGGGGDAGSKGPMVSAQESQAQAILQQARLALRGPAGPMGLTGRPGPVGPPGSGGLKGEPGDVGPQGPRGVQGPPGPAGKPGRRGRAGSDGARGMPGQTGPKGDRGFDGLAGLPGEKGHRGDPGPSGPPGPPGDDGERGDDGEVGPRGLPGEPGPRGLLGPKGPPGPPGPPGVTGMDGQPGPKGNVGPQGEPGPPGQQGNPGAQGLPGPQGAIGPPGEKGPLGKPGLPGMPGADGPPGHPGKEGPPGEKGGQGPPGPQGPIGYPGPRGVKGADGIRGLKGTKGEKGEDGFPGFKGDMGIKGDRGEIGPPGPRGEDGPEGPKGRGGPNGDPGPLGPPGEKGKLGVPGLPGYPGRQGPKGSIGFPGFPGANGEKGGRGTPGKPGPRGQRGPTGPRGERGPRGITGKPGPKGNSGGDGPAGPPGERGPNGPQGPTGFPGPKGPPGPPGKDGLPGHPGQRGETGFQGKTGPPGPPGVVGPQGPTGETGPMGERGHPGPPGPPGEQGLPGLAGKEGTKGDPGPAGLPGKDGPPGLRGFPGDRGLPGPVGALGLKGNEGPPGPPGPAGSPGERGPAGAAGPIGIPGRPGPQGPPGPAGEKGAPGEKGPQGPAGRDGLQGPVGLPGPAGPVGPPGEDGDKGEIGEPGQKGSKGDKGEQGPPGPTGPQGPIGQPGPSGADGEPGPRGQQGLFGQKGDEGPRGFPGPPGPVGLQGLPGPPGEKGETGDVGQMGPPGPPGPRGPSGAPGADGPQGPPGGIGNPGAVGEKGEPGEAGEPGPSGRSGPPGPKGERGEKGESGPSGAAGPPGPKGPPGDDGPKGSPGPVGFPGDPGPPGEPGPAGQDGPPGDKGDDGEPGQTGSPGPTGEPGPSGPPGKRGPPGPAGPEGRQGEKGAKGEAGLEGPPGKTGPIGPQGAPGKPGPDGLRGIPGPVGEQGLPGSPGPDGPPGPMGPPGLPGLKGDSGPKGEKGHPGLIGLIGPPGEQGEKGDRGLPGPQGSSGPKGEQGITGPSGPIGPPGPPGLPGPPGPKGAKGSSGPTGPKGEAGHPGPPGPPGPPGEVIQPLPIQASRTRRNIDASQLLDDGNGENYVDYADGMEEIFGSLNSLKLEIEQMKRPLGTQQNPARTCKDLQLCHPDFPDGEYWVDPNQGCSRDSFKVYCNFTAGGSTCVFPDKKSEGARITSWPKENPGSWFSEFKRGKLLSYVDAEGNPVGVVQMTFLRLLSASAHQNVTYHCYQSVAWQDAATGSYDKALRFLGSNDEEMSYDNNPYIRALVDGCATKKGYQKTVLEIDTPKVEQVPIVDIMFNDFGEASQKFGFEVGPACFMG

SEQ ID NO: 267 - protein, 109 aa, Homo sapiens
MKFISTSLLLMLLVSSLSPVQGVLEVYYTSLRCRCVQESSVFIPRRFIDRIQILPRGNGCPRKEIIVWKKNKSIVCVDPQAEWIQRMMEVLRKRSSSTLPVPVFKRKIP

SEQ ID NO: 268 - protein, 504 aa, Homo sapiens [sequence omitted]

SEQ ID NO: 269 - protein, 1498 aa, Homo sapiens
MVALRGLGSGLQPWCPLDLRLEWVDTVWELDFTETEPLDPSIEAEIIETGLAAFTKLYESLLPFATGEHGSMESIWTFFIENNVSHSTLVALFYHFVQIVHKKNVSVQYREYGLHAAGLYFLLLEVPGSVANQVFHPVMFDKCIQTLKKSWPQESNLNRKRKKEQPKSSQANPGRHRKRGKPPRREDIEMDEIIEEQEDENICFSARDLSQIRNAIFHLLKNFLRLLPKFSLKEKPQCVQNCIEVFVSLTNFEPVLHECHVTQARALNQAKYIPELAYYGLYLLCSPIHGEGDKVISCVFHQMLSVILMLEVGEGSHRAPLAVTSQVINCRNQAVQFISALVDELKESIFPVVRILLQHICAKVVDKSEYRTFAAQSLVQLLSKLPCGEYAMFIAWLYKYSRSSKIPHRVFTLDVVLALLELPEREVDNTLSLEHQKFLKHKFLVQEIMFDRCLDKAPTVRSKALSSFAHCLELTVTSASESILELLINSPTFSVIESHPGTLLRNSSAFSYQRQTSNRSEPSGEINIDSSGETVGSGERCVMAMLRRRIRDEKTNVRKSALQVLVSILKHCDVSGMKEDLWILQDQCRDPAVSVRKQALQSLTELLMAQPRCVQIQKAWLRGVVPVVMDCESTVQEKALEFLDQLLLQNIRHHSHFHSGDDSQVLAWALLTLLTTESQELSRYLNKAFHIWSKKEKFSPTFINNVISHTGTEHSAPAWMLLSKIAGSSPRLDYSRIIQSWEKISSQQNPNSNTLGHILCVIGHIAKHLPKSTRDKVTDAVKCKLNGFQWSLEVISSAVDALQRLCRASAETPAEEQELLTQVCGDVLSTCEHRLSNIVLKENGTGNMDEDLLVKYIFTLGDIAQLCPARVEKRIFLLIQSVLASSADADHSPSSQGSSEAPASQPPPQVRGSVMPSVIRAHAIITLGKLCLQHEDLAKKSIPALVRELEVCEDVAVRNNVIIVMCDLCIRYTIMVDKYIPNISMCLKDSDPFIRKQTLILLTNLLQEEFVKWKGSLFFRFVSTLIDSHPDIASFGEFCLAHLLLKRNPVMFFQHFIECIFHFNNYEKHEKYNKFPQSEREKRLFSLKGKSNKERRMKIYKFLLEHFTDEQRFNITSKICLSILACFADGILPLDLDASELLSDTFEVLSSKEIKLLAMRSKPDKDLLMEEDDMALANVVMQEAQKKLISQVQKRNFIENIIPIIISLKTVLEKNKIPALRELMHYLREVMQDYRDELKDFFAVDKQLASELEYDMKKYQEQLVQEQELAKHADVAGTAGGAEVAPVAQVALCLETVPVPAGQENPAMSPAVSQPCTPRASAGHVAVSSPTPETGPLQRLLPKARPMSLSTIAILNSVKKAVESKSRHRSRSLGVLPFTLNSGSPEKTCSQVSSYSLEQESNGEIEHVTKRAISTPEKSISDVTFGAGVSYIGTPRTPSSAKEKIEGRSQGNDILCLSLPDKPPPQPQQWNVRSPARNKDTPACSRRSLRKTPLKTAN

SEQ ID NO: 270 - protein, 551 aa, Homo sapiens [sequence omitted]

SEQ ID NO: 271 - protein, 2779 aa, Homo sapiens
MQGDLKTTDISIEPPSAQLEVQAGQVDLKLPEGHVPEGAGLKGHLPKLQMPSFKMPKVDRKGPQIDVKGPKLDLKGPKTDVTAPDVEVSQPGMEVDVEAPGAKLDGARLEGDLSLADKDVTAKDSKFKMPKFKMPSFGVSAPGKSIEVLVDVSAPKVEADLSLPSMQGDLKNTDISIEPPSAQLEVQAGQVDVKLPEGHVLEGAGLKGHLPKLQMPSFKMPKVDRKGPQIDIKGPKLDLKGPKMDVTAPDVEVSQPSMEVDVEAPGAKLDGARLEGDLSLADKDVTAKDSKFKMPKFKMPSYRASAPGKSIQASVDVSAPKAEADVSLPSMQGDLKTTDLSIQLPSVDLEVQAGQVDVKLPEGHVPEGAGLKGHLPKVEMPSFKMPKVDLKSPQVDIKGPKLDLKVPKAEVTVPDVEVSLPSVEVDVQAPRAKLDGARLEGDLSLAEKDVTAKDSKFKMPKFKMPSFGVSAPGRSIEASLDVSAPKVEADVSLSSMQGDLKATDLSIQPPSADLEVQAVQVDVELLEGPVPEGAGLKGHLPKVEMPSLKTPKVDLKGPQIDVKGPKLDLKGPKAEVRVPDVEVSLPSVEVDVQAPKAKLDAGRLEGDLSLADKDVTAKDSKFKMPKFKMPSFRVSAPGKSMEASVDVSAPKVEADVSLPSMQGDLKTTDLSIQPPSADLKVQAGQMDVKLPEGQVPEGAGLKEHLPKVEMPSLKMPKVDLKGPQVDIKGPKLDLKVSKAEVTAPDVEVSLPSVEVDVQAPRAKLDSAQLEGDLSLADKDVTAKDSKFKMPKFKMPSFGVSAPGKSIEASVHVSAPKVEADVSLPSMQGDLKTTDLSIQPHSADLTVQARQVDMKLLEGHVPEEAGLKGHLPKVQMPSFKMPKVDLKGPEIDIKGPKLDLKDPKVEVTAPDVEVSLPSVEVDVEAPGAKLDGARLEGDLSLADKDMTAKDSKFKMPKFKMPSFGVSAPGKSMEASVDVTAPKVEADVSLPSMQGDLKATDLSVQPPSADLEVQAGQVDVKLPEGPVPEGASLKGHLPKVQMPSFKMPKVDLKGPQIDVKGPKLDLKGPKAEVTAPDVKMSLSSMEVDVQAPRAKLDGVQLEGDLSLADKDVTAKDSKFKMPKFKMPSFGVSAPGKSMEASVDVSELKAKADVSLPSMQGDLKTTDLSIQSPSADLEVQAGQVDVKLPEGPLPKGAGLKGHLPKVQMPCLKMPKVALKGPQVDVKGPKLDLKGPKADVMTPVVEVSLPSMEVDVEAPGAKLDSVRLEGDLSLADKDMTAKDSKFKMPKFKMPSFGVSAPGKSIEASLDVSALKVEADVSLPSMQGDLKTTHLSIQPPSADLEVQAGQEDVKLPEGPVHEGAGLKGHLPKLQMPSFKVPKVDLKGPQIDVNVPKLDLKGPKVEVTSPNLDVSLPSMEVDIQAPGAKLDSTRLEGDLSLADKDVTAKDSKFKMPKFKMPSFGMLSPGKSIEVSVDVSAPKMEADMSIPSMQGDLKTTDLRIQAPSADLEVQAGQVDLKLPEGHMPEVAGLKGHLPKVEMPSFKMPKVDLKGPQVDVKGPKLDLKGPKAEVMAPDVEVSLPSVETDVQAPGSMLDGARLEGDLSLAHEDVAGKDSKFQGPKLSTSGFEWSSKKVSMSSSEIEGNVTFHEKTSTFPIVESVVHEGDLHDPSRDGNLGLAVGEVGMDSKFKKLHFKVPKVSFSSTKTPKDSLVPGAKSSIGLSTIPLSSSECSSFELQQVSACSEPSMQMPKVGFAGFPSSRLDLTGPHFESSILSPCEDVTLTKYQVTVPRAALAPELALEIPSGSQADIPLPKTECSTDLQPPEGVPTSQAESHSGPLNSMIPVSLGQVSFPKFYKPKFVFSVPQMAVPEGDLHAAVGAPVMSPLSPGERVQCPLPSTQLPSPGTCVSQGPEELVASLQTSVVAPGEAPSEDADHEGKGSPLKMPKIKLPSFRWSPKKETGPKVDPECSVEDSKLSLVLDKDEVAPQSAIHMDLPPERDGEKGRSTKPGFAMPKLALPKMKASKSGVSLPQRDVDPSLSSATAGGSFQDTEKASSDGGRGGLGATASATGSEGVNLHRPQVHIPSLGFAKPDLRSSKAKVEVSQPEADLPLPKHDLSTEGDSRGCGLGDVPVSQPCGEGIAPTPEDPLQPSCRKPDAEVLTVESPEEEAMTKYSQESWFKMPKFRMPSLRRSFRDRGGAGKLEVAQTQAPAATGGEAAAKVKEFLVSGSNVEAAMSLQLPEADAEVTASESKSSTDILRCDLDSTGLKLHLSTAGMTGDELSTSEVRIHPSKGPLPFQMPGMRLPETQVLPGEIDETPLSKPGHDLASMEDKTEKWSSQPEGPLKLKASSTDMPSQISVVNVDQLWEDSVLTVKFPKLMVPRFSFPAPSSEDDVFIPTVREVQCPEANIDTALCKESPGLWGASILKAGAGVPGEQPVDLNLPLEAPPISKVRVHIQGAQVESQEVTIHSIVTPEFVDLSVPRTFSTQIVRESEIPTSEIQTPSYGFSLLKVKIPEPHTQARVYTTMTQHSRTQEGTEEAPIQATPGVDSISGDLQPDTGEPFEMISSSVNVLGQQTLTFEVPSGHQLADSCSDEEPAEILEFPPDDSQEATTPLADEGRAPKDKPESKKSGLLWFWLPNIGFSSSVDETGVDSKNDVQRSAPIQTQPEARPEAELPKKQEKAGWFRFPKLGFSSSPTKKSKSTEDGAELEEQKLQEETITFFDARESFSPEEKEEGELIGPVGTGLDSRVMVTSAARTELILPEQDRKADDESKGSGLGPNEG

SEQ ID NO: 272 - protein, 512 aa, Homo sapiens
MDFESGQVDPLASVILPPNLLENLSPEDSVLVRRAQFTFFNKTGLFQDVGPQRKTLVSYVMACSIGNITIQNLKDPVQIKIKHTRTQEVHHPICAFWDLNKNKSFGGWNTSGCVAHRDSDASETVCLCNHFTHFGVLMDLPRSASQLDARNTKVLTFISYIGCGISAIFSAATLLTYVAFEKLRRDYPSKILMNLSTALLFLNLLFLLDGWITSFNVDGLCIAVAVLLHFFLLATFTWMGLEAIHMYIALVKVFNTYIRRYILKFCIIGWGLPALVVSVVLASRNNNEVYGKESYGKEKGDEFCWIQDPVIFYVTCAGYFGVMFFLNIAMFIVVMVQICGRNGKRSNRTLREEVLRNLRSVVSLTFLLGMTWGFAFFAWGPLNIPFMYLFSIFNSLQGLFIFIFHCAMKENVQKQWRRHLCCGRFRLADNSDWSKTATNIIKKSSDNLGKSLSSSSIGSNSTYLTSKSKSSSTTYFKRNSHTDNVSYEHSFNKSGSLRQCFHGQVLVKTGPC

SEQ ID NO: 273 - protein, 355 aa, Homo sapiens
MAAPAFEPGRQSDLLVKLNRLMERCLRNSKCIDTESLCVVAGEKVWQIRVDLHLLNHDGNIIDAASIAAIVALCHFRRPDVSVQGDEVTLYTPEERDPVPLSIHHMPICVSFAFFQQGTYLLVDPNEREERVMDGLLVIAMNKHREICTIQSSGGIMLLKDQVLRCSKIAGVKVAEITELILKALENDQKVRKEGGKFGFAESIANQRITAFKMEKAPIDTSDVEEKAEEIIAEAEPPSEVVSTPVLWTPGTAQIGEGVENSWGDLEDSEKEDDEGGGDQAIILDGIKMDTGVEVSDIGSQDAPIILSDSEEEEMIILEPDKNPKKIRTQTTSAKQEKAPSKKPVKRRKKKRAAN

SEQ ID NO: 274 - protein, 940 aa, Homo sapiens
MILEQYVVVSNYKKQENSELSLQAGEVVDVIEKNESGWWFVSTSEEQGWVPATYLEAQNGTRDDSDINTSKTGEEEKYVTVQPYTSQSKDEIGFEKGVTVEVIRKNLEGWWYIRYLGKEGWAPASYLKKAKDDLPTRKKNLAGPVEIIGNIMEISNLLNKKASGDKETPPAEGEGHEAPIAKKEISLPILCNASNGSAVGVPDRTVSRLAQGSPAVARIAPQRAQISSPNLRTRPPPRRESSLGFQLPKPPEPPSVEVEYYTIAEFQSCISDGISFRGGQKAEVIDKNSGGWWYVQIGEKEGWAPASYIDKRKKPNLSRRTSTLTRPKVPPPAPPSKPKEAEEGPTGASESQDSPRKLKYEEPEYDIPAFGFDSEPELSEEPVEDRASGERRPAQPHRPSPASSLQRARFKVGESSEDVALEEETIYENEGFRPYAEDTLSARGSSGDSDSPGSSSLSLTRKNSPKSGSPKSSSLLKLKAEKNAQAEMGKNHSSASFSSSITINTTCCSSSSSSSSSLSKTSGDLKPRSASDAGIRGTPKVRAKKDADANAGLTSCPRAKPSVRPKPFLNRAESQSQEKMDISTLRRQLRPTGQLRGGLKGSKSEDSELPPQTASEAPSEGSRRSSSDLITLPATTPPCPTKKEWEGPATSYMTCSAYQKVQDSEISFPAGVEVQVLEKQESGWWYVRFGELEGWAPSHYLVLDENEQPDPSGKELDTVPAKGRQNEGKSDSLEKIERRVQALNTVNQSKKATPPIPSKPPGGFGKTSGTPAVKMRNGVRQVAVRPQSVFVSPPPKDNNLSCALRRNESLTATDGLRGVRRNSSFSTARSAAAEAKGRLAERAASQGSDSPLLPAQRNSIPVSPVRPKPIEKSQFIHNNLKDVYVSIADYEGDEETAGFQEGVSMEVLERNPNGWWYCQILDGVKPFKGWVPSNYLEKKN

SEQ ID NO: 275 - protein, 871 aa, Homo sapiens
MKYSCCALVLAVLGTELLGSLCSTVRSPRFRGRIQQERKNIRPNIILVPTDDQDVELGSLQVMNKTRKIMEHGGATFINAFVTTPMCCPSRSSMLTGKYVHNHNVYTNNENCSSPSWQAMHEPRTFAVYLNNTGYRTAFFGKYLNEYNGSYIPPGWREWLGLIKNSRFYNYTVCRNGIKEKHGFDYAKDYFTDLITNESINYFKMSKRMYPHRPVMMVISHAAPHGPEDSAPQFSKLYPNASQHITPSYNYAPNMDKHWIMQYTGPMLPIHMEFTNILQRKRLQTLMSVDDSVERLYNMLVETGELENTYIIYTADHGYHIGQFGLVKGKSMPYDFDIRVPFFIRGPSVEPGSIVPQIVLNIDLAPTILDIAGLDTPPDVDGKSVLKLLDPEKPGNRFRTNKKAKIWRDTFLVERGKFLRKKEESSKNIQQSNHLPKYERVKELCQQARYQTACEQPGQKWQCIEDTSGKLRIHKCKGPSDLLTVRQSTRNLYARGFHDKDKECSCRESGYRASRSQRKSQRQFLRNQGTPKYKPRFVHTRQTRSLSVEFEGEIYDINLEEEEELQVLQPRNIAKRHDEGHKGPRDLQASSGGNRGRMLADSSNAVGPPTTVRVTHKCFILPNDSIHCERELYQSARAWKDHKAYIDKEIEALQDKIKNLREVRGHLKRRKPEECSCSKQSYYNKEKGVKKQEKLKSHLHPFKEAAQEVDSKLQLFKENNRRRKKERKEKRRQRKGEECSLPGLTCFTHDNNHWQTAPFWNLGSFCACTSSNNNTYWCLRTVNETHNFLFCEFATGFLEYFDMNTDPYQLTNTVHTVERGILNQLHVQLMELRSCQGYKQCNPRPKNLDVGNKDGGSYDLHRGQLWDGWEG

SEQ ID NO: 276 - protein, 1426 aa, Homo sapiens
MNDWHRIFTQNVLVPPHPQRARQPWKESTAFQCVLKWLDGPVIRQGVLEVLSEVECHLRVSFFDVTYRHFFGRTWKTTVKPTKRPPSRIVFNEPLYFHTSLNHPHIVAVVEVVAEGKKRDGSLQTLSCGFGILRIFSNQPDSPISASQDKRLRLYHGTPRALLHPLLQDPAEQNRHMTLIENCSLQYTLKPHPALEPAFHLLPENLLVSGLQQIPGLLPAHGESGDALRKPRLQKPITGHLDDLFFTLYPSLEKFEEELLELHVQDHFQEGCGPLDGGALEILERRLRVGVHNGLGFVQRPQVVVLVPEMDVALTRSASFSRKVVSSSKTSSGSQALVLRSRLRLPEMVGHPAFAVIFQLEYVFSSPAGVDGNAASVTSLSNLACMHMVRWAVWNPLLEADSGRVTLPLQGGIQPNPSHCLVYKVPSASMSSEEVKQVESGTLRFQFSLGSEEHLDAPTEPVSGPKVERRPSRKPPTSPSSPPAPVPRVLAAPQNSPVGPGLSISQLAASPRSPTQHCLARPTSQLPHGSQASPAQAQEFPLEAGISHLEADLSQTSLVLETSIAEQLQELPFTPLHAPIVVGTQTRSSAGQPSRASMVLLQSSGFPEILDANKQPAEAVSATEPVTFNPQKEESDCLQSNEMVLQFLAFSRVAQDCRGTSWPKTVYFTFQFYRFPPATTPRLQLVQLDEAGQPSSGALTHILVPVSRDGTFDAGSPGFQLRYMVGPGFLKPGERRCFARYLAVQTLQIDVWDGDSLLLIGSAAVQMKHLLRQGRPAVQASHELEVVATEYEQDNMVVSGDMLGFGRVKPIGVHSVVKGRLHLTLANVGHPCEQKVRGCSTLPPSRSRVISNDGASRFSGGSLLTTGSSRRKHVVQAQKLADVDSELAAMLLTHARQGKGPQDVSRESDATRRRKLERMRSVRLQEAGGDLGRRGTSVLAQQSVRTQHLRDLQVIAAYRERTKAESIASLLSLAITTEHTLHATLGVAEFFEFVLKNPHNTQHTVTVEIDNPELSVIVDSQEWRDFKGAAGLHTPVEEDMFHLRGSLAPQLYLRPHETAHVPFKFQSFSAGQLAMVQASPGLSNEKGMDAVSPWKSSAVPTKHAKVLFRASGGKPIAVLCLTVELQPHVVDQVFRFYHPELSFLKKAIRLPPWHTFPGAPVGMLGEDPPVHVRCSDPNVICETQNVGPGEPRDIFLKVASGPSPEIKDFFVIIYSDRWLATPTQTWQVYLHSLQRVDVSCVAGQLTRLSLVLRGTQTVRKVRAFTSHPQELKTDPKGVFVLPPRGVQDLHVGVRPLRAGSRFVHLNLVDVDCHQLVASWLVCLCCRQPLISKAFEIMLAAGEGKGVNKRITYTNPYPSRRTFHLHSDHPELLRFREDSFQVGGGETYTIGLQFAPSQRVGEEEILIYINDHEDKNEEAFCVKVIYQ

SEQ ID NO: 277 - protein, 146 aa, Homo sapiens
MMWQKYAGSRRSMPLGVRILFHGVFYAGGFAIVYYLIQKFHSRALYYKLAVEQLQSHPEAQEALGPPLNIHYLKLIDRENFVDIVDAKLKIPVSGSKSEGLLYVHSSRGGPFQRWHLDEVFLELKDGQQIPVFKLSGENGDEVKKE

SEQ ID NO: 278 - protein, 402 aa, Homo sapiens
MKETRGYGGDAPFCTRLNHSYTGMWAPERSAEARGNLTRPPGSGEDCGSVSVAFPITMLLTGFVGNALAMLLVSRSYRRRESKRKKSFLLCIGWLALTDLVGQLLTTPVVIVVYLSKQRWEHIDPSGRLCTFFGLTMTVFGLSSLFIASAMAVERALAIRAPHWYASHMKTRATRAVLLGVWLAVLAFALLPVLGVGQYTVQWPGTWCFISTGRGGNGTSSSHNWGNLFFASAFAFLGLLALTVTFSCNLATIKALVSRCRAKATASQSSAQWGRITTETAIQLMGIMCVLSVCWSPLLIMMLKMIFNQTSVEHCKTHTEKQKECNFFLIAVRLASLNQILDPWVYLLLRKILLRKFCQMRKRRLREQEMGPDGRCFCHAWRQVPRTWCSSHDREPCSVQLS

SEQ ID NO: 279 - protein, 1741 aa, Homo sapiens
MRLLWGLIWASSFFTLSLQKPRLLLFSPSVVHLGVPLSVGVQLQDVPRGQVVKGSVFLRNPSRNNVPCSPKVDFTLSSERDFALLSLQVPLKDAKSCGLHQLLRGPEVQLVAHSPWLKDSLSRTTNIQGINLLFSSRRGHLFLQTDQPIYNPGQRVRYRVFALDQKMRPSTDTITVMVENSHGLRVRKKEVYMPSSIFQDDFVIPDISEPGTWKISARFSDGLESNSSTQFEVKKYVLPNFEVKITPGKPYILTVPGHLDEMQLDIQARYIYGKPVQGVAYVRFGLLDEDGKKTFFRGLESQTKLVNGQSHISLSKAEFQDALEKLNMGITDLQGLRLYVAAAIIESPGGEMEEAELTSWYFVSSPFSLDLSKTKRHLVPGAPFLLQALVREMSGSPASGIPVKVSATVSSPGSVPEAQDIQQNTDGSGQVSIPIIIPQTISELQLSVSAGSPHPAIARLTVAAPPSGGPGFLSIERPDSRPPRVGDTLNLNLRAVGSGATFSHYYYMILSRGQIVFMNREPKRTLTSVSVFVDHHLAPSFYFVAFYYHGDHPVANSLRVDVQAGACEGKLELSVDGAKQYRNGESVKLHLETDSLALVALGALDTALYAAGSKSHKPLNMGKVFEAMNSYDLGCGPGGGDSALQVFQAAGLAFSDGDQWTLSRKRLSCPKEKTTRKKRNVNFQKAINEKLGQYASPTAKRCCQDGVTRLPMMRSCEQRAARVQQPDCREPFLSCCQFAESLRKKSRDKGQAGLQRALEILQEEDLIDEDDIPVRSFFPENWLWRVETVDRFQILTLWLPDSLTTWEIHGLSLSKTKGLCVATPVQLRVFREFHLHLRLPMSVRRFEQLELRPVLYNYLDKNLTVSVHVSPVEGLCLAGGGGLAQQVLVPAGSARPVAFSVVPTAAAAVSLKVVARGSFEFPVGDAVSKVLQIEKEGAIHREELVYELNPLDHRGRTLEIPGNSDPNMIPDGDFNSYVRVTASDPLDTLGSEGALSPGGVASLLRLPRGCGEQTMIYLAPTLAASRYLDKTEQWSTLPPETKDHAVDLIQKGYMRIQQFRKADGSYAAWLSRDSSTWLTAFVLKVLSLAQEQVGGSPEKLQETSNWLLSQQQADGSFQDPCPVLDRSMQGGLVGNDETVALTAFVTIALHHGLAVFQDEGAEPLKQRVEASISKANSFLGEKASAGLLGAHAAAITAYALSLTKAPVDLLGVAHNNLMAMAQETGDNLYWGSVTGSQSNAVSPTPAPRNPSDPMPQAPALWIETTAYALLHLLLHEGKAEMADQASAWLTRQGSFQGGFRSTQDTVIALDALSAYWIASHTTEERGLNVTLSSTGRNGFKSHALQLNNRQIRGLEEELQFSLGSKINVKVGGNSKGTLKVLRTYNVLDMKNTTCQDLQIEVTVKGHVEYTMEANEDYEYDELPAKDDPDAPLQPVTPLQLFEGRRNRRRREAPKVVEEQESRVHYTVCIWRNGKVGLSGMAIADVTLLSGFHALRADLEKLTSLSDRYVSHFETEGPHVLLYFDSVPTSRECVGFEAVQEVPVGLVQPASATLYDYYNPERRCSVFYGAPSKSRLLATLCSAEVCQCAEGKCPRQRRALERGLQDEDGYRMKFACYYPRVEYGFQVKVLREDSRAAFRLFETKITQVLHFTKDVKAAANQMRNFLVRASCRLRLEPGKEYLIMGLDGATYDLEGHPQYLLDSNSWIEEMPSERLCRSTRQRAACAQLNDFLQEYGTQGCQV

SEQ ID NO: 280 - protein, 2150 aa, Homo sapiens
MYPNWGRYGGSSHYPPPPVPPPPPVALPEASPGPGYSSSTTPAAPSSSGFMSFREQHLAQLQQLQQMHQKQMQCVLQPHHLPPPPLPPPPVMPGGGYGDWQPPPPPMPPPPGPALSYQKQQQYKHQMLHHQRDGPPGLVPMELESPPESPPVPPGSYMPPSQSYMPPPQPPPSYYPPTSSQPYLPPAQPSPSQSPPSQSYLAPTPSYSSSSSSSQSYLSHSQSYLPSSQASPSRPSQGHSKSQLLAPPPPSAPPGNKTTVQQEPLESGAKNKSTEQQQAAPEPDPSTMTPQEQQQYWYRQHLLSLQQRTKVHLPGHKKGPVVAKDTPEPVKEEVTVPATSQVPESPSSEEPPLPPPNEEVPPPLPPEEPQSEDPEEDARLKQLQAAAAHWQQHQQHRVGFQYQGIMQKHTQLQQILQQYQQIIQPPPHIQTMSVDMQLRHYEMQQQQFQHLYQEWEREFQLWEEQLHSYPHKDQLQEYEKQWKTWQGHMKATQSYLQEKVNSFQNMKNQYMGNMSMPPPFVPYSQMPPPLPTMPPPVLPPSLPPPVMPPALPATVPPPGMPPPVMPPSLPTSVPPPGMPPSLSSAGPPPVLPPPSLSSAGPPPVLPPPSLSSTAPPPVMPLPPLSSATPPPGIPPPGVPQGIPPQLTAAPVPPASSSQSSQVPEKPRPALLPTPVSFGSAPPTTYHPPLQSAGPSEQVNSKAPLSKSALPYSSFSSDQGLGESSAAPSQPITAVKDMPVRSGGLLPDPPRSSYLESPRGPRFDGPRRFEDLGSRCEGPRPKGPRFEGNRPDGPRPRYEGHPAEGTKSKWGMIPRGPASQFYITPSTSLSPRQSGPQWKGPKPAFGQQHQQQPKSQAEPLSGNKEPLADTSSNQQKNFKMQSAAFSIAADVKDVKAAQSNENLSDSQQEPPKSEVSEGPVEPSNWDQNVQSMETQIDKAQAVTQPVPLANKPVPAQSTFPSKTGGMEGGTAVATSSLTADNDFKPVGIGLPHSENNQDKGLPRPDNRDNRLEGNRGNSSSYRGPGQSRMEDTRDKGLVNRGRGQAISRGPGLVKQEDFRDKMMGRREDSREKMNRGEGSRDRGLVRPGSSREKVPGGLQGSQDRGAAGSRERGPPRRAGSQERGPLRRAGSRERIPPRRAGSRERGPPRGPGSRERGLGRSDFGRDRGPFRPEPGDGGEKMYPYHRDEPPRAPWNHGEERGHEEFPLDGRNAPMERERLDDWDRERYWRECERDYQDDTLELYNREDRFSAPPSRSHDGDRRGPWWDDWERDQDMDEDYNREMERDMDRDVDRISRPMDMYDRSLDNEWDRDYGRPLDEQESQFRERDIPSLPPLPPLPPLPPLDRYRDDRWREERNREHGYDRDFRDRGELRIREYPERGDTWREKRDYVPDRMDWERERLSDRWYPSDVDRHSPMAEHMPSSHHSSEMMGSDASLDSDQGLGGVMVLSQRQHEIILKAAQELKMLREQKEQLQKMKDFGSEPQMADHLPPQESRLQNTSSRPGMYPPPGSYRPPPPMGKPPGSIVRPSAPPARSSVPVTRPPVPIPPPPPPPPLPPPPPVIKPQTSAVEQERWDEDSFYGLWDTNDEQGLNSEFKSETAAIPSAPVLPPPPVHSSIPPPGPVPMGMPPMSKPPPVQQTVDYGHGRDISTNKVEQIPYGERITLRPDPLPERSTFETEHAGQRDRYDRERDREPYFDRQSNVIADHRDFKRDRETHRDRDRDRGVIDYDRDRFDRERRPRDDRAQSYRDKKDHSSSRRGGFDRPSYDRKSDRPVYEGPSMFGGERRTYPEERMPLPAPSLSHQPPPAPRVEKKPESKNVDDILKPPGRESRPERIVVIMRGLPGSGKTHVAKLIRDKEVEFGGPAPRVLSLDDYFITEVEKEEKDPDSGKKVKKKVMEYEYEAEMEETYRTSMFKTFKKTLDDGFFPFIILDAINDRVRHFDQFWSAAKTKGFEVYLAEMSADNQTCGKRNIHGRKLKEINKMADHWETAPRHMMRLDIRSLLQDAAIEEVEMEDFDANIEEQKEEKKDAEEEESELGYIPKSKWEMDTSEAKLDKLDGLRTGTKRKRDWEAIASRMEDYLQLPDDYDTRASEAKASRSFFVCHLASTFQFLFCFYCFSFFDAEEEESELVGDRPTTLNSVSLLKFLKKV

SEQ ID NO: 281 - protein, 979 aa, Homo sapiens
MSVLGEYERHCDSINSDFGSESGGCGDSSPGPSASQGPRAGGGAAEQEELHYIPIRVLGRGAFGEATLYRRTEDDSLVVWKEVDLTRLSEKERRDALNEIVILALLQHDNIIAYYNHFMDNTTLLIELEYCNGGNLYDKILRQKDKLFEEEMVVWYLFQIVSAVSCIHKAGILHRDIKTLNIFLTKANLIKLGDYGLAKKLNSEYSMAETLVGTPYYMSPELCQGVKYNFKSDIWAVGCVIFELLTLKRTFDATNPLNLCVKIVQGIRAMEVDSSQYSLELIQMVHSCLDQDPEQRPTADELLDRPLLRKRRREMEEKVTLLNAPTKRPRSSTVTEAPIAVVTSRTSEVYIWGGGKSTPQKLDVIKSGCSARQVCAGNTHFAVVTVEKELYTWVNMQGGTKLHGQLGHGDKASYRQPKHVEKLQGKAIHQVSCGDDFTVCVTDEGQLYAFGSDYYGCMGVDKVAGPEVLEPMQLNFFLSNPVEQVSCGDNHVVVLTRNKEVYSWGCGEYGRLGLDSEEDYYTPQKVDVPKALIIVAVQCGCDGTFLLTQSGKVLACGLNEFNKLGLNQCMSGIINHEAYHEVPYTTSFTLAKQLSFYKIRTIAPGKTHTAAIDERGRLLTFGCNKCGQLGVGNYKKRLGINLLGGPLGGKQVIRVSCGDEFTIAATDDNHIFAWGNGGNGRLAMTPTERPHGSDICTSWPRPIFGSLHHVPDLSCRGWHTILIVEKVLNSKTIRSNSSGLSIGTVFQSSSPGGGGGGGGGEEEDSQQESETPDPSGGFRGTMEADRGMEGLISPTEAMGNSNGASSSCPGWLRKELENAEFIPMPDSPSPLSAAFSESEKDTLPYEELQGLKVASEAPLEHKPQVEASSPRLNPAVTCAGKGTPLTPPACACSSLQVEVERLQGLVLKCLAEQQKLQQENLQIFTQLQKLNKKLEGGQQVGMHSKGTQTAKEEMEMDPKPDLDSDSGCLLGTDSCRPSL

SEQ ID NO: 282 - protein, 107 aa, Homo sapiens
MRFFLFFFFFLRWSLVSPRLECSGLVLAHCNLHLLGSRESPASASRVAGITGVSHHTQTHLMSFDVKACNSNPYVWNICITSEFFHLVNSCTSLSCPFFPPLAVSYC

SEQ ID NO: 283 - protein, 533 aa, Homo sapiens
MTKKRIAVIGGGVSGLSSIKCCVEEGLEPVCFERTDDIGGLWRFQENPEEGRASIYKSVIINTSKEMMCFSDYPIPDHYPNFMHNAQVLEYFRMYAKEFDLLKYIRFKTTVCSVKKQPDFATSGQWEVVTESEGKKEMNVFDGVMVCTGHHTNAHLPLESFPGIEKFKGQYFHSRDYKNPEGFTGKRVIIIGIGNSGGDLAVEISQTAKQVFLSTRRGAWILNRVGDYGYPADVLFSSRLTHFIWKICGQSLANKYLEKKINQRFDHEMFGLKPKHRALSQHPTLNDDLPNRIISGLVKVKGNVKEFTETAAIFEDGSREDDIDAVIFATGYSFDFPFLEDSVKVVKNKIPLYKKVFPPNLERPTLAIIGLIQPLGAIMPISELQGRWATQVFKGLKTLPSQSEMMAEISKAQEEIDKRYVESQRHTIQGDYIDTMEELADLVGVRPNLLSLAFTDPKLALHLLLGPCTPIHYRVQGPGKWDGARKAILTTDDRIRKPLMTRVVERSSSMTSTMTIGKFMLALAFFAIIIAYF

SEQ ID NO: 284 - protein, 757 aa, Homo sapiens
MVPDTACVLLLTLAALGASGQGQSPLGSDLGPQMLRELQETNAALQDVRDWLRQQVREITFLKNTVMECDACGMQQSVRTGLPSVRPLLHCAPGFCFPGVACIQTESGGRCGPCPAGFTGNGSHCTDVNECNAHPCFPRVRCINTSPGFRCEACPPGYSGPTHQGVGLAFAKANKQVCTDINECETGQHNCVPNSVCINTRGSFQCGPCQPGFVGDQASGCQRGAQRFCPDGSPSECHEHADCVLERDGSRSCVCRVGWAGNGILCGRDTDLDGFPDEKLRCPEPQCRKDNCVTVPNSGQEDVDRDGIGDACDPDADGDGVPNEKDNCPLVRNPDQRNTDEDKWGDACDNCRSQKNDDQKDTDQDGRGDACDDDIDGDRIRNQADNCPRVPNSDQKDSDGDGIGDACDNCPQKSNPDQADVDHDFVGDACDSDQDQDGDGHQDSRDNCPTVPNSAQEDSDHDGQGDACDDDDDNDGVPDSRDNCRLVPNPGQEDADRDGVGDVCQDDFDADKVVDKIDVCPENAEVTLTDFRAFQTVVLDPEGDAQIDPNWVVLNQGREIVQTMNSDPGLAVGYTAFNGVDFEGTFHVNTVTDDDYAGFIFGYQDSSSFYVVMWKQMEQTYWQANPFRAVAEPGIQLKAVKSSTGPGEQLRNALWHTGDTESQVRLLWKDPRNVGWKDKKSYRWFLQHRPQVGYIRVRFYEGPELVADSNVVLDTTMRGGRLGVFCFSQENIIWANLRYRCNDTIPEDYETHQLRQA

SEQ ID NO: 285 - protein, 3396 aa, Homo sapiens
MFINIKSILWMCSTLIVTHALHKVKVGKSPPVRGSLSGKVSLPCHFSTMPTLPPSYNTSEFLRIKWSKIEVDKNGKDLKETTVLVAQNGNIKIGQDYKGRVSVPTHPEAVGDASLTVVKLLASDAGLYRCDVMYGIEDTQDTVSLTVDGVVFHYRAATSRYTLNFEAAQKACLDVGAVIATPEQLFAAYEDGFEQCDAGWLADQTVRYPIRAPRVGCYGDKMGKAGVRTYGFRSPQETYDVYCYVDHLDGDVFHLTVPSKFTFEEAAKECENQDARLATVGELQAAWRNGFDQCDYGWLSDASVRHPVTVARAQCGGGLLGVRTLYRFENQTGFPPPDSRFDAYCFKPKEATTIDLSILAETASPSLSKEPQMVSDRTTPIIPLVDELPVIPTEFPPVGNIVSFEQKATVQPQAITDSLATKLPTPTGSTKKPWDMDDYSPSASGPLGKLDISEIKEEVLQSTTGVSHYATDSWDGVVEDKQTQESVTQIEQIEVGPLVTSMEILKHIPSKEFPVTETPLVTARMILESKTEKKMVSTVSELVTTGHYGFTLGEEDDEDRTLTVGSDESTLIFDQIPEVITVSKTSEDTIHTHLEDLESVSASTTVSPLIMPDNNGSSMDDWEERQTSGRITEEFLGKYLSTTPFPSQHRTEIELFPYSGDKILVEGISTVIYPSLQTEMTHRRERTETLIPEMRTDTYTDEIQEEITKSPFMGKTEEEVFSGMKLSTSLSEPIHVTESSVEMTKSFDFPTLITKLSAEPTEVRDMEEDFTATPGTTKYDENITTVLLAHGTLSVEAATVSKWSWDEDNTTSKPLESTEPSASSKLPPALLTTVGMNGKDKDIPSFTEDGADEFTLIPDSTQKQLEEVTDEDIAAHGKFTIRFQPTTSTGIAEKSTLRDSTTEEKVPPITSTEGQVYATMEGSALGEVEDVDLSKPVSTVPQFAHTSEVEGLAFVSYSSTQEPTTYVDSSHTIPLSVIPKTDWGVLVPSVPSEDEVLGEPSQDILVIDQTRLEATISPETMRTTKITEGTTQEEFPWKEQTAEKPVPALSSTAWTPKEAVTPLDEQEGDGSAYTVSEDELLTGSERVPVLETTPVGKIDHSVSYPPGAVTEHKVKTDEVVTLTPRIGPKVSLSPGPEQKYETEGSSTTGFTSSLSPFSTHITQLMEETTTEKTSLEDIDLGSGLFEKPKATELIEFSTIKVTVPSDITTAFSSVDRLHTTSAFKPSSAITKKPPLIDREPGEETTSDMVIIGESTSHVPPTTLEDIVAKETETDIDREYFTTSSPPATQPTRPPTVEDKEAFGPQALSTPQPPASTKFHPDINVYIIEVRENKTGRMSDLSVIGHPIDSESKEDEPCSEETDPVHDLMAEILPEFPDIIEIDLYHSEENEEEEEECANATDVTTTPSVQYINGKHLVTTVPKDPEAAEARRGQFESVAPSQNFSDSSESDTHPFVIAKTELSTAVQPNESTETTESLEVTWKPETYPETSEHFSGGEPDVFPTVPFHEEFESGTAKKGAESVTERDTEVGHQAHEHTEPVSLFPEESSGEIAIDQESQKIAFARATEVTFGEEVEKSTSVTYTPTIVPSSASAYVSEEEAVTLIGNPWPDDLLSTKESWVEATPRQVVELSGSSSIPITEGSGEAEEDEDTMFTMVTDLSQRNTTDTLITLDTSRIITESFFEVPATTIYPVSEQPSAKVVPTKFVSETDTSEWISSTTVEEKKRKEEEGTTGTASTFEVYSSTQRSDQLILPFELESPNVATSSDSGTRKSFMSLTTPTQSEREMTDSTPVFTETNTLENLGAQTTEHSSIHQPGVQEGLTTLPRSPASVFMEQGSGEAAADPETTTVSSFSLNVEYAIQAEKEVAGTLSPHVETTFSTEPTGLVLSTVMDRVVAENITQTSREIVISERLGEPNYGAEIRGFSTGFPLEEDFSGDFREYSTVSHPIAKEETVMMEGSGDAAFRDTQTSPSTVPTSVHISHISDSEGPSSTMVSTSAFPWEEFTSSAEGSGEQLVTVSSSVVPVLPSAVQKFSGTASSIIDEGLGEVGTVNEIDRRSTILPTAEVEGTKAPVEKEEVKVSGTVSTNFPQTIEPAKLWSRQEVNPVRQEIESETTSEEQIQEEKSFESPQNSPATEQTIFDSQTFTETELKTTDYSVLTTKKTYSDDKEMKEEDTSLVNMSTPDPDANGLESYTTLPEATEKSHFFLATALVTESIPAEHVVTDSPIKKEESTKHFPKGMRPTIQESDTELLFSGLGSGEEVLPTLPTESVNFTEVEQINNTLYPHTSQVESTSSDKIEDFNRMENVAKEVGPLVSQTDIFEGSGSVTSTTLIEILSDTGAEGPTVAPLPFSTDIGHPQNQTVRWAEEIQTSRPQTITEQDSNKNSSTAEINETTTSSTDFLARAYGFEMAKEFVTSAPKPSDLYYEPSGEGSGEVDIVDSFHTSATTQATRQESSTTFVSDGSLEKHPEVPSAKAVTADGFPTVSVMLPLHSEQNKSSPDPTSTLSNTVSYERSTDGSFQDRFREFEDSTLKPNRKKPTENIIIDLDKEDKDLILTITESTILEILPELTSDKNTIIDIDHTKPVYEDILGMQTDIDTEVPSEPHDSNDESNDDSTQVQEIYEAAVNLSLTEETFEGSADVLASYTQATHDESMTYEDRSQLDHMGFHFTTGIPAPSTETELDVLLPTATSLPIPRKSATVIPEIEGIKAEAKALDDMFESSTLSDGQAIADQSEIIPTLGQFERTQEEYEDKKHAGPSFQPEFSSGAEEALVDHTPYLSIATTHLMDQSVTEVPDVMEGSNPPYYTDTTLAVSTFAKLSSQTPSSPLTIYSGSEASGHTEIPQPSALPGIDVGSSVMSPQDSFKEIHVNIEATFKPSSEEYLHITEPPSLSPDTKLEPSEDDGKPELLEEMEASPTELIAVEGTEILQDFQNKTDGQVSGEAIKMFPTIKTPEAGTVITTADEIELEGATQWPHSTSASATYGVEAGVVPWLSPQTSERPTLSSSPEINPETQAALIRGQDSTIAASEQQVAARILDSNDQATVNPVEFNTEVATPPFSLLETSNETDFLIGINEESVEGTAIYLPGPDRCKMNPCLNGGTCYPTETSYVCTCVPGYSGDQCELDFDECHSNPCRNGATCVDGFNTFRCLCLPSYVGALCEQDTETCDYGWHKFQGQCYKYFAHRRTWDAAERECRLQGAHLTSILSHEEQMFVNRVGHDYQWIGLNDKMFEHDFRWTDGSTLQYENWRPNQPDSFFSAGEDCVVIIWHENGQWNDVPCNYHLTYTCKKGTVACGQPPVVENAKTFGKMKPRYEINSLIRYHCKDGFIQRHLPTIRCLGNGRWAIPKITCMNPSAYQRTYSMKYFKNSSSAKDNSINTSKHDHRWSRRWQESRR

SEQ ID NO: 286 - protein, 148 aa, Homo sapiens [sequence omitted]

SEQ ID NO: 287 - protein, 449 aa, Homo sapiens
MLWKLVENVKYEDIYEDRHDGVPSHSSRLSQLGSVSQGPYSSAPPLSHTPSSDFQPPYFPPPYQPLPYHQSQDPYSHVNDPYSLNPLHQPQQHPWGQRQRQEVGSEAGSLLPQPRAALPQLSGLDPRRDYHSVRRPDVLLHSAHHGLDAGMGDSLSLHGLGHPGMEDVQSVEDANNSGMNLLDQSVIKKVPVPPKSVTSLMMNKDGFLGGMSVNTGEVFCSVPGRLSLLSSTSKYKVTVGEVQRRLSPPECLNASLLGGVLRRAKSKNGGRSLRERLEKIGLNLPAGRRKAANVTLLTSLVEGEAVHLARDFGYICETEFPAKAVSEYLNRQHTDPSDLHSRKNMLLATKQLCKEFTDLLAQDRTPIGNSRPSPILEPGIQSCLTHFSLITHGFGAPAICAALTALQNYLTEALKGMDKMFLNNTTTNRHTSGEGPGSKTGDKEEKHRK

SEQ ID NO: 288 - protein, 114 aa, Homo sapiens
MLLSVMAYDRFVAICHPLYHSAIMNPCFCGFLLLLSFFFFLSLLDTQLHNLIALQMTCFKDVEIPNFFCDPSQLPHLACCDTFTNNIIVYFPAVIFVFLPISGTLFSLKLFPPF

SEQ ID NO: 289 - protein, 195 aa, Homo sapiens
MMAIRELKVCLLGDTGVGKSSIVCRFVQDHFDHNISPTIGASFMTKTVPCGNELHKFLIWDTAGQERFHSLAPMYYRGSAAAVIVYDITKQDSFYTLKKWVKELKEHGPENIVMAIAGNKCDLSDIREVPLKDAKEYAESIGAIVVETSAKNAINIEELFQGISRQIPPLDPHENGNNGTIKVEKPTMQASRRCC

SEQ ID NO: 290 - protein, 270 aa, Homo sapiens
MAASSSGEKEKERLGGGLGVAGGNSTRERLLSALEDLEVLSRELIEMLAISRNQKLLQAGEENQVLELLIHRDGEFQELMKLALNQGKIHHEMQVLEKEVEKRDSDIQQLQKQLKEAEQILATAVYQAKEKLKSIEKARKGAISSEEIIKYAHRISASNAVCAPLTWVPGDPRRPYPTDLEMRSGLLGQMNNPSTNGVNGHLPGDALAAGRLPDVLAPQYPWQSNDMSMNMLPPNHSSDFLLEPPGHNKENEDDVEIMSTDSSSSSSESD

SEQ ID NO: 291 - protein, 228 aa, Homo sapiens
MLSRCRSGLLHVLGLSFLLQTRRPILLCSPRLMKPLVVFVLGGPGAGKGTQCARIVEKYGYTHLSAGELLRDERKNPDSQYGELIEKYIKEGKIVPVEITISLLKREMDQTMAANAQKNKFLIDGFPRNQDNLQGWNKTMDGKADVSFVLFFDCNNEICIERCLERGKSSGRSDDNRESLEKRIQTYLQSTKPIIDLYEEMGKVKKIDASKSVDEVFDEVVQIFDKEG

SEQ ID NO: 292 - protein, 130 aa, Homo sapiens
MAFCLRASLGPDCCCWYQSPETLPPWSPCMPSCSYCLVALKQHISTVPGRIVGGFTTPAFLTSSSAQHWVPLPSFPAGASWATVSGSGPARVVLLFLLLLGNHTWQVKCPKHLVSLPKNKPFLCTSLEAR

SEQ ID NO: 293 - protein, 460 aa, Homo sapiens
MASLLQSDRVLYLVQGEKKVRAPLSQLYFCRYCSELRSLECVSHEVDSHYCPSCLENMPSAEAKLKKNRCANCFDCPGCMHTLSTRATSISTQLPDDPAKTTMKKAYYLACGFCRWTSRDVGMADKSVASGGWQEPENPHTQRMNKLIEYYQQLAQKEKVERDRKKLARRRNYMPLAFSDKYGLGTRLQRPRAGASISTLAGLSLKEGEDQKEIKIEPAQAVDEVEPLPEDYYTRPVNLTEVTTLQQRLLQPDFQPVCASQLYPRHKHLLIKRSLRCRKCEHNLSKPEFNPTSIKFKIQLVAVNYIPEVRIMSIPNLRYMKESQVLLTLTNPVENLTHVTLFECEEGDPDDINSTAKVVVPPKELVLAGKDAAAEYDELAEPQDFQDDPDIIAFRKANKVGIFIKVTPQREEGEVTVCFKMKHDFKNLAAPIRPIEESDQGTEVIWLTQHVELSLGPLLP

SEQ ID NO: 294 - protein, 524 aa, Homo sapiens
MTAEDSTAAMSSDSAAGSSAKVPEGVAGAPNEAALLALMERTGYSMVQENGQRKYGGPPPGWEGPHPQRGCEVFVGKIPRDVYEDELVPVFEAVGRTYELRLMMDFDGKNRGYAFVMYCHKHEAKRAVRELNNYEIRPGRLLGVCCSVDNCRLFIGGIPKMKKREEILEEIAKVTEGVLDVIVYASAADKMKNRGFAFVEYESHRAAAMARRKLMPGRIQLWGHQIAVDWAEPEIDVDEDVMETVKILYVRNLMIETTEDTIKKSFGQFNPGCVERVKKIRDYAFVHFTSREDAVHAMNNLNGTELEGSCLEVTLAKPVDKEQYSRYQKAARGGGAAEAAQQPSYVYSCDPYTLAYYGYPYNALIGPNRDYFVKVAIPAIGAQYSMFPAAPAPKMIEDGKIHTVEHMISPIAVQPDPASAAAAAAAAAAAAAAVIPTVSTPPPFQGRPITPVYTVAPNVQRIPTAGIYGASYVPFAAPATATIATLQKNAAAAAAVYGGYAGYIPQAFPAAAIQVPIPDVYQTY

SEQ ID NO: 295 - protein, 1232 aa, Homo sapiens
MKEEVKGIPVRVALRCRPLVPKEISEGCQMCLSFVPGEPQVVVGTDKSFTYDFVFDPSTEQEEVFNTAVAPLIKGVFKGYNATVLAYGQTGSGKTYSMGGAYTAEQENEPTVGVIPRVIQLLFKEIDKKSDFEFTLKVSYLEIYNEEILDLLCPSREKAQINIREDPKEGIKIVGLTEKTVLVALDTVSCLEQGNNSRTVASTAMNSQSSRSHAIFTISLEQGKKSDKNSSFRSKLHLVDLAGSERQKKTKAEGDRLKEGININRGLLCLGNVISALGDDKKGGFAPYRDSKLTRLLQDSLGGNSHTLMIACVSPADSNLEETLNTLRYADRARKIKNKPIVNIDPQTAELNHLKQQVQQLQVLLLQAHGGTLPGSITVEPSENLQSLMEKNQSLVEENEKLSRGLSEAAGQTAQMLERIIWTEQANEKMNAKLEELRQHAACKLDLQKLVETLEDQELKENVEIICNLQQLITQLSDETVACMAAAIDTAVEQEAQVETSPETSRSSDAFTTQHALRQAQMSKELVELNKALALKEALARKMTQNDSQLQPIQYQYQDNIKEPELEVINLQKEKEELVLELQTAKKDANQAKLSERRRKRLQELEGQIADLKKKLNEQSKLLKLKESTERTVSKLNQEIRMMKNQRVQLMRQMKEDAEKFRQWKQKRDKEVIQLKERDRKRQYELLKLERNFQKQSNVLRRKTEEAAAANKRLKDALQKQREVADKRKETQSRGMEGTAARVKNWLGNEIEVMVSTEEAKRHLNDLLEDRKILAQDVAQLKEKKESGENPPPKLRRRTFSLTEVRGQVSESEDSITKQIESLETEMEFRSAQIADLQQKLLDAESEDRPKQRWENIATILEAKCALKYLIGELVSSKIQVSKLESSLKQSKTSCADMQKMLFEERNHFAEIETELQAELVRMEQQHQEKVLYLLSQLQQSQMAEKQLEESVSEKEQQLLSTLKCQDEELEKMREVCEQNQQLLRENEIIKQKLTLLQVASRQKHLPKDTLLSPDSSFEYVQPKPKPSRVKEKFLEQSMDIEDLKYCSEHSVNEHEDGDGDDDEGDDEEWKPTKLVNVSRKNIQGCSCKGWCGNKQCGCRKQKSDCGVDCCCDPTKCRNRQQGKDSLGTVERTQDSESSFKLEDPTEVTPGLSFFNPVCATPNSKILKEMCDVEQVLSKKTPPAPSPFDLPELKHVATEYQENKAPGKKKKRALASNTSFFSGCSPIEEEAH

SEQ ID NO: 296 - protein, 230 aa, Homo sapiens
MAQGLIEVERKFLPGPGTEERLQELGGTLEYRVTFRDTYYDTPELSLMQADHWLRRREDSGWELKCPGAAGVLGPHTEYKELTAEPTIVAQLCKVLRADGLGAGDVAAVLGPLGLQEVASFVTKRSAWKLVLLGADEEEPQLRVDLDTADFGYAVGEVEALVHEEAEVPTALEKIHRLSSMLGVPAQETAPAKLIVYLQRFRPQDYQRLLEVNSSRERPQETEDPDHCLG

SEQ ID NO: 297 - protein, 329 aa, Homo sapiens
MSGVVPTAPEQPAGEMENQTKPPDPRPDAPPEYSSHFLPGPPGTAVPPPTGYPGGLPMGYYSPQQPSTFPLYQPVGGIHPVRYQPGKYPMPNQSVPITWMPGPTPMANCPPGLEYLVQLDNIHVLQHFEPLEMMTCFETNNRYDIKNNSDQMVYVVTEDTDDFTRNAYRTLRPFVLRVTDCMGREIMTMQRPFRCTCCCFCCPSARQELEVQCPPGVTIGFVAEHWNLCRAVYSIQNEKKENVMRVRGPCSTYGCGSDSVFEVKSLDGISNIGSIIRKWNGLLSAMADADHFDIHFPLDLDVKMKAMIFGACFLIDFMYFERSPPQRSR

SEQ ID NO: 298 - protein, 323 aa, Homo sapiens
MGGQVSASNSFSRLHCRNANEDWMSALCPRLWDVPLHHLSIPGSHDTMTYCLNKKSPISHEESRLLQLLNKALPCITRPVVLKWSVTQALDVTEQLDAGVRYLDLRIAHMLEGSEKNLHFVHMVYTTALVEDTLTEISEWLERHPREVVILACRNFEGLSEDLHEYLVACIKNIFGDMLCPRGEVPTLRQLWSRGQQVIVSYEDESSLRRHHELWPGVPYWWGNRVKTEALIRYLETMKSCGRPGGLFVAGINLTENLQYVLAHPSESLEKMTLPNLPRLSAWVREQCPGPGSRCTNIIAGDFIGADGFVSDVIALNQKLLWC

SEQ ID NO: 299 - protein, 103 aa, Homo sapiens
MTTEIGWWKLTFLRKKKSTPKVLYEIPDTYAQTEGDAEPPRPDAGGPNSDFNTRLEKIVDKSTKGKHVKVSNSGRFKEKKKVRATLAENPNLFDDHEEGRSSK

SEQ ID NO: 300 - protein, 999 aa, Homo sapiens
MGVAGRNRPGAAWAVLLLLLLLPPLLLLAGAVPPGRGRAAGPQEDVDECAQGLDDCHADALCQNTPTSYKCSCKPGYQGEGRQCEDIDECGNELNGGCVHDCLNIPGNYRCTCFDGFMLAHDGHNCLDVDECLENNGGCQHTCVNVMGSYECCCKEGFFLSDNQHTCIHRSEEGLSCMNKDHGCSHICKEAPRGSVACECRPGFELAKNQRDCILTCNHGNGGCQHSCDDTADGPECSCHPQYKMHTDGRSCLEREDTVLEVTESNTTSVVDGDKRVKRRLLMETCAVNNGGCDRTCKDTSTGVHCSCPVGFTLQLDGKTCKDIDECQTRNGGCDHFCKNIVGSFDCGCKKGFKLLTDEKSCQDVDECSLDRTCDHSCINHPGTFACACNRGYTLYGFTHCGDTNECSINNGGCQQVCVNTVGSYECQCHPGYKLHWNKKDCVEVKGLLPTSVSPRVSLHCGKSGGGDGCFLRCHSGIHLSSDVTTIRTSVTFKLNEGKCSLKNAELFPEGLRPALPEKHSSVKESFRYVNLTCSSGKQVPGAPGRPSTPKEMFITVEFELETNQKEVTASCDLSCIVKRTEKRLRKAIRTLRKAVHREQFHLQLSGMNLDVAKKPPRTSERQAESCGVGQGHAENQCVSCRAGTYYDGARERCILCPNGTFQNEEGQMTCEPCPRPGNSGALKTPEAWNMSECGGLCQPGEYSADGFAPCQLCALGTFQPEAGRTSCFPCGGGLATKHQGATSFQDCETRVQCSPGHFYNTTTHRCIRCPVGTYQPEFGKNNCVSCPGNTTTDFDGSTNITQCKNRRCGGELGDFTGYIESPNYPGNYPANTECTWTINPPPKRRILIVVPEIFLPIEDDCGDYLVMRKTSSSNSVTTYETCQTYERPIAFTSRSKKLWIQFKSNEGNSARGFQVPYVTYDEDYQELIEDIVRDGRLYASENHQEILKDKKLIKALFDVLAHPQNYFKYTAQESREMFPRSFIRLLRSKVSRFLRPYK

SEQ ID NO: 301 - protein, 340 aa, Homo sapiens
MCAQYCISFADVEKAHINIRDSIHLTPVLTSSILNQLTGRNLFFKCELFQKTGSFKIRGALNAVRSLVPDALERKPKAVVTHSSGNHGQALTYAAKLEGIPAYIVVPQTAPDCKKLAIQAYGASIVYCEPSDESRENVAKRVTEETEGIMVHPNQEPAVIAGQGTIALEVLNQVPLVDALVVPVGGGGMLAGIAITVKALKPSVKVYAAEPSNADDCYQSKLKGKLMPNLYPPETIADGVKSSIGLNTWPIIRDLVDDIFTVTEDEIKCATQLVWERMKLLIEPTAGVGVAAVLSQHFQTVSPEVKNICIVLSGGNVDLTSSITWVKQAERPASYQSVSV

SEQ ID NO: 302 - protein, 218 aa, Homo sapiens
MNRLFGKAKPKAPRPSLTDCIGTVDSRAESIDKKISRLDAELVKYKDQIKKMREGPAKNMVKQKALRVLKQKRMYEQQRDNLANSHSTWTGHYTIQSLKDTKTTVDAMKLGVKEMKKAYKPVKIDQIEDLQDQLEDMMEDANEIQEALSRSYGTPELDEDDLEAELDALGDELLADEDSSYLDEAASAPAIPEGVPTDTKNKDGVLVDEFGLPQIPAS

SEQ ID NO: 303 - protein, 635 aa, Homo sapiens
MAPPLLLLLLASGAAACPLPCVCQNLSESLSTLCAHRGLLFVPPNVDRRTVELRLADNFIQALGPPDFRNMTGLVDLTLSRNAITRIGARAFGDLESLRSLHLDGNRLVELGTGSLRGPVNLQHLILSGNQLGRIAPGAFDDFLESLEDLDLSYNNLRQVPWAGIGAMPALHTLNLDHNLIDALPPGAFAQLGQLSRLDLTSNRLATLAPDPLFSRGRDAEASPAPLVLSFSGNPLHCNCELLWLRRLARPDDLETCASPPGLAGRYFWAVPEGEFSCEPPLIARHTQRLWVLEGQRATLRCRALGDPAPTMHWVGPDDRLVGNSSRARAFPNGTLEIGVTGAGDAGGYTCIATNPAGEATARVELRVLALPHGGNSSAEGGRPGPSDIAASARTAAEGEGTLESEPAVQVTEVTATSGLVSWGPGRPADPVWMFQIQYNSSEDETLIYRIVPASSHHFLLKHLVPGADYDLCLLALSPAAGPSDLTATRLLGCAHFSTLPASPLCHALQAHVLGGTLTVAVGGVLVAALLVFTVALLVRGRGAGNGRLPLKLSHVQSQTNGGPSPTPKAHPPRSPPPRPQRSCSLDLGDAGCYGYARRLGGAWARRSHSVHGGLLGAGCRGVGGSAERLEESVV

SEQ ID NO: 304 - protein, 498 aa, Homo sapiens
MDVTDHYEDVRKIYDDFLKNSNMLDLIDVYQKCRALTSNCENYNTVSPSQLLDFLSGKQYAVGDETDLSIPTSPTSKYNRDNEKVQLLARKIIFSYLNLLVNSKNDLAVAYILNIPDRGLGREAFTDLKHAAREKQMSIFLVATSFIRTIELGGKGYAPPPSDPLRTHVKGLSNFINFIDKLDEILGEIPNPSIAGGQILSVIKMQLIKGQNSRDPFCKAIEEVAQDLDLRIKNIINSQEGVVALSTTDISPARPKSHAINHGTAYCGRDTVKALLVLLDEEAANAPTKNKAELLYDEEDTIHHHGTSILTLFRSPTQVNNLIKPLRERICVSMQEKKIKMKQTLIRSQFACTYKDDYMISKDNWNNVNLASKPLCVLYMENDLSEGVNPSVGRSTIGTSFGNVHLDRSKNEKVSRKSTSQTGNKSSKRKQVDLDGENILCDNRNEPPQHKNAKIPKKSNDSQNRLYGKLAKVAKSNKCTAKDKLISGQAKLTQFFRL

SEQ ID NO: 305 - protein, 172 aa, Homo sapiens
MRDIAILKEKQEKEIQTLQEETKKVQAETASKTREVQAQLLQEKRLLEKQLSEPDRRLLGKRKRRELNMKAQALKLAAKRFIFEYSCGINRENQQFKKELLQLIEQAQKLTATQSHLENRKQQLQQEQWYLESLIQARQRLQGSHNQCLNRQDVPKTTPSLPQGTKSRINPK

SEQ ID NO: 306 - protein, 330 aa, Homo sapiens
MRRPSVRAAGLVLCTLCYLLVGAAVFDALESEAESGRQRLLVQKRGALRRKFGFSAEDYRELERLALQAEPHRAGRQWKFPGSFYFAITVITTIGYGHAAPGTDSGKVFCMFYALLGIPLTLVTFQSLGERLNAVVRRLLLAAKCCLGLRWTCVSTENLVVAGLLACAATLALGAVAFSHFEGWTFFHAYYYCFITLTTIGFGDFVALQSGEALQRKLPYVAFSFLYILLGLTVIGAFLNLVVLRFLVASADWPERAARPPSPRPPGAPESRGLWLPRRPARSVGSASVFCHVHKLERCARDNLGFSPPSSPGVVRGGQAPRPGARWKSI

SEQ ID NO: 307 - protein, 741 aa, Homo sapiens
MESRDHNNPQEGPTSSSGRRAAVEDNHLLIKAVQNEDVDLVQQLLEGGANVNFQEEEGGWTPLHNAVQMSREDIVELLLRHGADPVLRKKNGATPFILAAIAGSVKLLKLFLSKGADVNECDFYGFTAFMEAAVYGKVKALKFLYKRGANVNLRRKTKEDQERLRKGGATALMDAAEKGHVEVLKILLDEMGADVNACDNMGRNALIHALLSSDDSDVEAITHLLLDHGADVNVRGERGKTPLILAVEKKHLGLVQRLLEQEHIEINDTDSDGKTALLLAVELKLKKIAELLCKRGASTDCGDLVMTARRNYDHSLVKVLLSHGAKEDFHPPAEDWKPQSSHWGAALKDLHRIYRPMIGKLKFFIDEKYKIADTSEGGIYLGFYEKQEVAVKTFCEGSPRAQREVSCLQSSRENSHLVTFYGSESHRGHLFVCVTLCEQTLEACLDVHRGEDVENEEDEFARNVLSSIFKAVQELHLSCGYTHQDLQPQNILIDSKKAAHLADFDKSIKWAGDPQEVKRDLEDLGRLVLYVVKKGSISFEDLKAQSNEEVVQLSPDEETKDLIHRLFHPGEHVRDCLSDLLGHPFFWTWESRYRTLRNVGNESDIKTRKSESEILRLLQPGPSEHSKSFDKWTTKINECVMKKMNKFYEKRGNFYQNTVGDLLKFIRNLGEHIDEEKHKKMKLKIGDPSLYFQKTFPDLVIYVYTKLQNTEYRKHFPQTHSPNKPQCDGAGGASGLASPGC

SEQ ID NO: 308 - protein, 651 aa, Homo sapiens
MSGVRAVRISIESACEKQVHEVGLDGTETYLPPLSMSQNLARLAQRIDFSQGSGSEEEEAAGTEGDAQEWPGAGSSADQDDEEGVVKFQPSLWPWDSVRNNLRSALTEMCVLYDVLSIVRDKKFMTLDPVSQDALPPKQNPQTLQLISKKKSLAGAAQILLKGAERLTKSVTENQENKLQRDFNSELLRLRQHWKLRKVGDKILGDLSYRSAGSLFPHHGTFEVIKNTDLDLDKKIPEDYCPLDVQIPSDLEGSAYIKVSIQKQAPDIGDLGTVNLFKRPLPKSKPGSPHWQTKLEAAQNVLLCKEIFAQLSREAVQIKSQVPHIVVKNQIISQPFPSLQLSISLCHSSNDKKSQKFATEKQCPEDHLYVLEHNLHLLIREFHKQTLSSIMMPHPASAPFGHKRMRLSGPQAFDKNEINSLQSSEGLLEKIIKQAKHIFLRSRAAATIDSLASRIEDPQIQAHWSNINDVYESSVKVLITSQGYEQICKSIQLQLNIGVEQIRVVHRDGRVITLSYQEQELQDFLLSQMSQHQVHAVQQLAKVMGWQVLSFSNHVGLGPIESIGNASAITVASPSGDYAISVRNGPESGSKIMVQFPRNQCKDLPKSDVLQDNKWSHLRGPFKEVQWNKMEGRNFVYKMELLMSALSPCLL

SEQ ID NO: 309 - protein, 1496 aa, Homo sapiens
MMANWAEARPLLILIVLLGQFVSIKAQEEDEDEGYGEEIACTQNGQMYLNRDIWKPAPCQICVCDNGAILCDKIECQDVLDCADPVTPPGECCPVCSQTPGGGNTNFGRGRKGQKGEPGLVPVVTGIRGRPGPAGPPGSQGPRGERGPKGRPGPRGPQGIDGEPGVPGQPGAPGPPGHPSHPGPDGLSRPFSAQMAGLDEKSGLGSQVGLMPGSVGPVGPRGPQGLQGQQGGAGPTGPPGEPGDPGPMGPIGSRGPEGPPGKPGEDGEPGRNGNPGEVGFAGSPGARGFPGAPGLPGLKGHRGHKGLEGPKGEVGAPGSKGEAGPTGPMGAMGPLGPRGMPGERGRLGPQGAPGQRGAHGMPGKPGPMGPLGIPGSSGFPGNPGMKGEAGPTGARGPEGPQGQRGETGPPGPVGSPGLPGAIGTDGTPGPKGPTGSPGTSGPPGSAGPPGSPGPQGSTGPQGNSGLPGDPGFKGEAGPKGEPGPHGIQGPIGPPGEEGKRGPRGDPGTLGPPGPVGERGAPGNRGFPGSDGLPGPKGAQGERGPVGSSGPKGSQGDPGRPGEPGLPGARGLTGNPGVQGPEGKLGPLGAPGEDGRPGPPGSIGIKGQPGTMGLPGPKGSNGDPGKPGEAGNPGVPGQRGAPGKDGKVGPYGPPGPPGLRGERGEQGPPGPTGFQGHPGPPGPPGEGGKPGDQGVPGGPGAVGPLGPRGERGNPGERGEPGITGLPGEKGMAGGHGPDGPKGSPGPSGTPGDTGPPGLQGMPGERGIAGTPGPKGDRGGIGEKGAEGTAGNDGAGGLPGPLGPPGPAGLLGEKGEPGPRGLVGPPGSRGNPGSRGENGPTGAVGFAGPQGSDGQPGVKGEPGEPGQKGDAGSPGPQGLAGSPGPHGPNGVPGLKGGRGTQGPPGATGFPGSAGRVGPPGPAGAPGPAGPLGEPGKEGPPGPRGDPGSHGRVGVRGPAGPPGGPGDKGDPGEDGQPGPDGPPGPAGTTGQRGIVGMPGQRGERGMPGLPGPAGTPGKVGPTGATGDKGPPGPVGPPGSNGPVGEPGPEGPAGNDGTPGRDGAVGERGDRGDPGPAGLPGSQGAPGTPGPVGAPGDAGQRGDPGSRGPIGHLGRAGKRGLPGPQGPRGDKGDHGDRGDRGQKGHRGFTGLQGLPGPPGPNGEQGSAGIPGPFGPRGPPGPVGPSGKEGNPGPLGPLGPPGVRGSVGEAGPEGPPGEPGPPGPPGPPGHLTAALGDIMGHYDESMPDPLPEFTEDQAAPDDKNKTDPGVHATLKSLSSQIETMRSPDGSKKHPARTCDDLKLCHSAKQSGEYWIDPNQGSVEDAIKVYCNMETGETCISANPSSVPRKTWWASKSPDNKPVWYGLDMNRGSQFAYGDHQSPNTAITQMTFLRLLSKEASQNITYICKNSVGYMDDQAKNLKKAVVLKGANDLDIKAEGNIRFRYIVLQDTCSKRNGNVGKTVFEYRTQNVARLPIIDLAPVDVGGTDQEFGVEIGPVCFV

SEQ ID NO: 310 - protein, 52 aa, Homo sapiens
MKRKTKTPSEGGQVLAEQRGSRSCQRLTARKALPILVFTIETATACTDHFGS

SEQ ID NO: 311 - protein, 330 aa, Homo sapiens
MAEEDLAPGKSSVAVNNCIRQLSYCKNDIRDTVGIWGEGKDMYLILENDMLSLVDPMDRSVLHSQPIVSIRVWGVGRDNGRDFAYVARDKDTRILKCHVFRCDTPAKAIATSLHEICSKIMAERKNAKALACSSLQERANVNLDVPLQVDFPTPKTELVQKFHVQYLGMLPVDKPVGMDILNSAIENLMTSSNKEDWLSVNMNVADATVTVISEKNEEEVLVECRVRFLSFMGVGKDVHTFAFIMDTGNQRFECHVFWCEPNAGNVSEAVQAACMLRYQKCLVARPPSQKVRPPPPPADSVTRRVTTNVKRGVLSLIDTLKQKRPVTEMP

SEQ ID NO: 312 - protein, 115 aa, Homo sapiens
MSRHSRLQRQVLSLYRDLLRAGRGKPGAEARVRAEFRQHAGLPRSDVLRIEYLYRRGRRQLQLLRSGHATAMGAFVRPRAPTGEPGGVGCQPDDGDSPRNPHDSTGAPETRPDGR

SEQ ID NO: 313 - protein, 321 aa, Homo sapiens
MKEDCLPSSHVPISDSKSIQKSELLGLLKTYNCYHEGKSFQLRHREEEGTLIIEGLLNIAWGLRRPIRLQMQDDREQVHLPSTSWMPRRPSCPLKEPSPQNGNITAQGPSIQPVHKAESSTDSSGPLEEAEEAPQLMRTKSDASCMSQRRPKCRAPGEAQRIRRHRFSINGHFYNHKTSVFTPAYGSVTNVRVNSTMTTLQVLTLLLNKFRVEDGPSEFALYIVHESGERTKLKDCEYPLISRILHGPCEKIARIFLMEADLGVEVPHEVAQYIKFEMPVLDSFVEKLKEEEEREIIKLTMKFQALRLTMLQRLEQLVEAK

SEQ ID NO: 314 - protein, 490 aa, Homo sapiens
MWPQDPSRKEVLRFAVSCRILTLMLQALFNAIIPDHHAEAFSPPRLAPSGFVDQLVEGLLGGLSHWDAEHFLFIAEHGYLYEHNFAFFPGFPLALLVGTELLRPLRGLLSLRSCLLISVASLNFLFFMLAAVALHDLGCLVLHCPHQSFYAALLFCLSPANVFLAAGYSEALFALLTFSAMGQLERGRVWTSVLLFAFATGVRSNGLVSVGFLMHSQCQGFFSSLTMLNPLRQLFKLMASLFLSVFTLGLPFALFQYYAYTQFCLPGSARPIPEPLVQLAVDKGYRIAEGNEPPWCFWDVPLIYSYIQDVYWNVGFLKYYELKQVPNFLLAAPVAILVAWATWTYVTTHPWLCLTLGLQRSKNNKTLEKPDLGFLSPQVFVYVVHAAVLLLFGGLCMHVQVLTRFLGSSTPIMYWFPAHLLQDQEPLLRSLKTVPWKPLAEDSPPGQKVPRNPIMGLLYHWKTCSPVTRYILGYFLTYWLLGLLLHCNFL

SEQ ID NO: 315 - protein, 688 aa, Homo sapiens
MSSRTVLAPGNDRNSDTHGTLGSGRSSDKGPSWSSRSLGARCRNSIASCPEEQPHVGNYRLLRTIGKGNFAKVKLARHILTGREVAIKIIDKTQLNPSSLQKLFREVRIMKGLNHPNIVKLFEVIETEKTLYLVMEYASAGEVFDYLVSHGRMKEKEARAKFRQIVSAVHYCHQKNIVHRDLKAENLLLDAEANIKIADFGFSNEFTLGSKLDTFCGSPPYAAPELFQGKKYDGPEVDIWSLGVILYTLVSGSLPFDGHNLKELRERVLRGKYRVPFYMSTDCESILRRFLVLNPAKRCTLEQIMKDKWINIGYEGEELKPYTEPEEDFGDTKRIEVMVGMGYTREEIKESLTSQKYNEVTATYLLLGRKTEEGGDRGAPGLALARVRAPSDTTNGTSSSKGTSHSKGQRSSSSTYHRQRRHSDFCGPSPAPLHPKRSPTSTGEAELKEERLPGRKASCSTAGSGSRGLPPSSPMVSSAHNPNKAEIPERRKDSTSTPNNLPPSMMTRRNTYVCTERPGAERPSLLPNGKENSSGTPRVPPASPSSHSLAPPSGERSRLARGSTIRSTFHGGQVRDRRAGGGGGGGVQNGPPASPTLAHEAAPLPAGRPRPTTNLFTKLTSKLTRRVTLDPSKRQNSNRCVSGASLPQGSKIRSQTNLRESGDLRSQVAIYLGIKRKPPPGCSDSPGV

SEQ ID NO: 316 - protein, 338 aa, Homo sapiens
MSLSAFTLFLALIGGTSGQYYDYDFPLSIYGQSSPNCAPECNCPESYPSAMYCDELKLKSVPMVPPGIKYLYLRNNQIDHIDEKAFENVTDLQWLILDHNLLENSKIKGRVFSKLKQLKKLHINHNNLTESVGPLPKSLEDLQLTHNKITKLGSFEGLVNLTFIHLQHNRLKEDAVSAAFKGLKSLEYLDLSFNQIARLPSGLPVSLLTLYLDNNKISNIPDEYFKRFNALQYLRLSHNELADSGIPGNSFNVSSLVELDLSYNKLKNIPTVNENLENYYLEVNQLEKFDIKSFCKILGPLSYSKIKHLRLDGNRISETSLPPDMYECLRVANEVTLN

SEQ ID NO: 317 - protein, 1466 aa, Homo sapiens
MMSFVQKGSWLLLALLHPTIILAQQEAVEGGCSHLGQSYADRDVWKPEPCQICVCDSGSVLCDDIICDDQELDCPNPEIPFGECCAVCPQPPTAPTRPPNGQGPQGPKGDPGPPGIPGRNGDPGIPGQPGSPGSPGPPGICESCPTGPQNYSPQYDSYDVKSGVAVGGLAGYPGPAGPPGPPGPPGTSGHPGSPGSPGYQGPPGEPGQAGPSGPPGPPGAIGPSGPAGKDGESGRPGRPGERGLPGPPGIKGPAGIPGFPGMKGHRGFDGRNGEKGETGAPGLKGENGLPGENGAPGPMGPRGAPGERGRPGLPGAAGARGNDGARGSDGQPGPPGPPGTAGFPGSPGAKGEVGPAGSPGSNGAPGQRGEPGPQGHAGAQGPPGPPGINGSPGGKGEMGPAGIPGAPGLMGARGPPGPAGANGAPGLRGGAGEPGKNGAKGEPGPRGERGEAGIPGVPGAKGEDGKDGSPGEPGANGLPGAAGERGAPGFRGPAGPNGIPGEKGPAGERGAPGPAGPRGAAGEPGRDGVPGGPGMRGMPGSPGGPGSDGKPGPPGSQGESGRPGPPGPSGPRGQPGVMGFPGPKGNDGAPGKNGERGGPGGPGPQGPPGKNGETGPQGPPGPTGPGGDKGDTGPPGPQGLQGLPGTGGPPGENGKPGEPGPKGDAGAPGAPGGKGDAGAPGERGPPGLAGAPGLRGGAGPPGPEGGKGAAGPPGPPGAAGTPGLQGMPGERGGLGSPGPKGDKGEPGGPGADGVPGKDGPRGPTGPIGPPGPAGQPGDKGEGGAPGLPGIAGPRGSPGERGETGPPGPAGFPGAPGQNGEPGGKGERGAPGEKGEGGPPGVAGPPGGSGPAGPPGPQGVKGERGSPGGPGAAGFPGARGLPGPPGSNGNPGPPGPSGSPGKDGPPGPAGNTGAPGSPGVSGPKGDAGQPGEKGSPGAQGPPGAPGPLGIAGITGARGLAGPPGMPGPRGSPGPQGVKGESGKPGANGLSGERGPPGPQGLPGLAGTAGEPGRDGNPGSDGLPGRDGSPGGKGDRGENGSPGAPGAPGHPGPPGPVGPAGKSGDRGESGPAGPAGAPGPAGSRGAPGPQGPRGDKGETGERGAAGIKGHRGFPGNPGAPGSPGPAGQQGAIGSPGPAGPRGPVGPSGPPGKDGTSGHPGPIGPPGPRGNRGERGSEGSPGHPGQPGPPGPPGAPGPCCGGVGAAAIAGIGGEKAGGFAPYYGDEPMDFKINTDEIMTSLKSVNGQIESLISPDGSRKNPARNCRDLKFCHPELKSGEYWVDPNQGCKLDAIKVFCNMETGETCISANPLNVPRKHWWTDSSAEKKHVWFGESMDGGFQFSYGNPELPEDVLDVQLAFLRLLSSRASQNITYHCKNSIAYMDQASGNVKKALKLMGSNEGEFKAEGNSKFTYTVLEDGCTKHTGEWSKTVFEYRTRKAVRLPIVDIAPYDIGGPDQEFGVDVGPVCFL

SEQ ID NO: 318 - protein, 1464 aa, Homo sapiens
MFSFVDLRLLLLLAATALLTHGQEEGQVEGQDEDIPPITCVQNGLRYHDRDVWKPEPCRICVCDNGKVLCDDVICDETKNCPGAEVPEGECCPVCPDGSESPTDQETTGVEGPKGDTGPRGPRGPAGPPGRDGIPGQPGLPGPPGPPGPPGPPGLGGNFAPQLSYGYDEKSTGGISVPGPMGPSGPRGLPGPPGAPGPQGFQGPPGEPGEPGASGPMGPRGPPGPPGKNGDDGEAGKPGRPGERGPPGPQGARGLPGTAGLPGMKGHRGFSGLDGAKGDAGPAGPKGEPGSPGENGAPGQMGPRGLPGERGRPGAPGPAGARGNDGATGAAGPPGPTGPAGPPGFPGAVGAKGEAGPQGPRGSEGPQGVRGEPGPPGPAGAAGPAGNPGADGQPGAKGANGAPGIAGAPGFPGARGPSGPQGPGGPPGPKGNSGEPGAPGSKGDTGAKGEPGPVGVQGPPGPAGEEGKRGARGEPGPTGLPGPPGERGGPGSRGFPGADGVAGPKGPAGERGSPGPAGPKGSPGEAGRPGEAGLPGAKGLTGSPGSPGPDGKTGPPGPAGQDGRPGPPGPPGARGQAGVMGFPGPKGAAGEPGKAGERGVPGPPGAVGPAGKDGEAGAQGPPGPAGPAGERGEQGPAGSPGFQGLPGPAGPPGEAGKPGEQGVPGDLGAPGPSGARGERGFPGERGVQGPPGPAGPRGANGAPGNDGAKGDAGAPGAPGSQGAPGLQGMPGERGAAGLPGPKGDRGDAGPKGADGSPGKDGVRGLTGPIGPPGPAGAPGDKGESGPSGPAGPTGARGAPGDRGEPGPPGPAGFAGPPGADGQPGAKGEPGDAGAKGDAGPPGPAGPAGPPGPIGNVGAPGAKGARGSAGPPGATGFPGAAGRVGPPGPSGNAGPPGPPGPAGKEGGKGPRGETGPAGRPGEVGPPGPPGPAGEKGSPGADGPAGAPGTPGPQGIAGQRGVVGLPGQRGERGFPGLPGPSGEPGKQGPSGASGERGPPGPMGPPGLAGPPGESGREGAPAAEGSPGRDGSPGAKGDRGETGPAGPPGAPGAPGAPGPVGPAGKSGDRGETGPAGPAGPVGPVGARGPAGPQGPRGDKGETGEQGDRGIKGHRGFSGLQGPPGPPGSPGEQGPSGASGPAGPRGPPGSAGAPGKDGLNGLPGPIGPPGPRGRTGDAGPVGPPGPPGPPGPPGPPSAGFDFSFLPQPPQEKAHDGGRYYRADDANVVRDRDLEVDTTLKSLSQQIENIRSPEGSRKNPARTCRDLKMCHSDWKSGEYWIDPNQGCNLDAIKVFCNMETGETCVYPTQPSVAQKNWYISKNPKDKRHVWFGESMTDGFQFEYGGQGSDPADVAIQLTFLRLMSTEASQNITYHCKNSVAYMDQQTGNLKKALLLKGSNEIEIRAEGNSRFTYSVTVDGCTSHTGAWGKTVIEYKTTKSSRLPIIDVAPLDVGAPDQEFGFDVGPVCFL

SEQ ID NO: 319 - protein, 764 aa, Homo sapiens
MGSNLSPQLCLMPFILGLLSGGVTTTPWSLAQPQGSCSLEGVEIKGGSFRLLQEGQALEYVCPSGFYPYPVQTRTCRSTGSWSTLKTQDQKTVRKAECRAIHCPRPHDFENGEYWPRSPYYNVSDEISFHCYDGYTLRGSANRTCQVNGRWSGQTAICDNGAGYCSNPGIPIGTRKVGSQYRLEDSVTYHCSRGLTLRGSQRRTCQEGGSWSGTEPSCQDSFMYDTPQEVAEAFLSSLTETIEGVDAEDGHGPGEQQKRKIVLDPSGSMNIYLVLDGSDSIGASNFTGAKKCLVNLIEKVASYGVKPRYGLVTYATYPKIWVKVSEADSSNADWVTKQLNEINYEDHKLKSGTNTKKALQAVYSMMSWPDDVPPEGWNRTRHVIILMTDGLHNMGGDPITVIDEIRDLLYIGKDRKNPREDYLDVYVFGVGPLVNQVNINALASKKDNEQHVFKVKDMENLEDVFYQMIDESQSLSLCGMVWEHRKGTDYHKQPWQAKISVIRPSKGHESCMGAVVSEYFVLTAAHCFTVDDKEHSIKVSVGGEKRDLEIEVVLFHPNYNINGKKEAGIPEFYDYDVALIKLKNKLKYGQTIRPICLPCTEGTTRALRLPPTTTCQQQKEELLPAQDIKALFVSEEEKKLTRKEVYIKNGDKKGSCERDAQYAPGYDKVKDISEVVTPRFLCTGGVSPYADPNTCRGDSGGPLIVHKRSRFIQVGVISWGVVDVCKNQKRQKQVPAHARDFHINLFQVLPWLKEKLQDEDLGFL

SEQ ID NO: 320 - protein, 909 aa, Homo sapiens
MAARPLPVSPARALLLALAGALLAPCEARGVSLWNQGRADEVVSASVRSGDLWIPVKSFDSKNHPEVLNIRLQRESKELIINLERNEGLIASSFTETHYLQDGTDVSLARNYTVILGHCYYHGHVRGYSDSAVSLSTCSGLRGLIVFENESYVLEPMKSATNRYKLFPAKKLKSVRGSCGSHHNTPNLAAKNVFPPPSQTWARRHKRETLKATKYVELVIVADNREFQRQGKDLEKVKQRLIEIANHVDKFYRPLNIRIVLVGVEVWNDMDKCSVSQDPFTSLHEFLDWRKMKLLPRKSHDNAQLVSGVYFQGTTIGMAPIMSMCTADQSGGIVMDHSDNPLGAAVTLAHELGHNFGMNHDTLDRGCSCQMAVEKGGCIMNASTGYPFPMVFSSCSRKDLETSLEKGMGVCLFNLPEVRESFGGQKCGNRFVEEGEECDCGEPEECMNRCCNATTCTLKPDAVCAHGLCCEDCQLKPAGTACRDSSNSCDLPEFCTGASPHCPANVYLHDGHSCQDVDGYCYNGICQTHEQQCVTLWGPGAKPAPGICFERVNSAGDPYGNCGKVSKSSFAKCEMRDAKCGKIQCQGGASRPVIGTNAVSIETNIPLQQGGRILCRGTHVYLGDDMPDPGLVLAGTKCADGKICLNRQCQNISVFGVHECAMQCHGRGVCNNRKNCHCEAHWAPPFCDKFGFGGSTDSGPIRQADNQGLTIGILVTILCLLAAGFVVYLKRKTLIRLLFTNKKTTIEKLRCVRPSRPPRGFQPCQAHLGHLGKGLMRKPPDSYPPKDNPRRLLQCQNVDISRPLNGLNVPQPQSTQRVLPPLHRAPRAPSVPARPLPAKPALRQAQGTCKPNPPQKPLPADPLARTTRLTHALARTPGQWETGLRLAPLRPAPQYPHQVPRSTHTAYIK

SEQ ID NO: 321 - protein, 574 aa, Homo sapiens
MALARGSRQLGALVWGACLCVLVHGQQAQPGQGSDPARWRQLIQWENNGQVYSLLNSGSEYVPAGPQRSESSSRVLLAGAPQAQQRRSHGSPRRRQAPSLPLPGRVGSDTVRGQARHPFGFGQVPDNWREVAVGDSTGMALARTSVSQQRHGGSASSVSASAFASTYRQQPSYPQQFPYPQAPFVSQYENYDPASRTYDQGFVYYRPAGGGVGAGAAAVASAGVIYPYQPRARYEEYGGGEELPEYPPQGFYPAPERPYVPPPPPPPDGLDRRYSHSLYSEGTPGFEQAYPDPGPEAAQAHGGDPRLGWYPPYANPPPEAYGPPRALEPPYLPVRSSDTPPPGGERNGAQQGRLSVGSVYRPNQNGRGLPDLVPDPNYVQASTYVQRAHLYSLRCAAEEKCLASTAYAPEATDYDVRVLLRFPQRVKNQGTADFLPNRPRHTWEWHSCHQHYHSMDEFSHYDLLDAATGKKVAEGHKASFCLEDSTCDFGNLKRYACTSHTQGLSPGCYDTYNADIDCQWIDITDVQPGNYILKVHVNPKYIVLESDFTNNVVRCNIHYTGRYVSATNCKIVQS

SEQ ID NO: 322 - protein, 344 aa, Homo sapiens
MGPPSAPPCRLHVPWKEVLLTASLLTFWNPPTTAKLTIESTPFNVAEGKEVLLLAHNLPQNRIGYSWYKGERVDGNSLIVGYVIGTQQATPGPAYSGRETIYPNASLLIQNVTQNDTGFYTLQVIKSDLVNEEATGQFHVYPELPKPSISSNNSNPVEDKDAVAFTCEPEVQNTTYLWWVNGQSLPVSPRLQLSNGNMTLTLLSVKRNDAGSYECEIQNPASANRSDPVTLNVLYGPDVPTISPSKANYRPGENLNLSCHAASNPPAQYSWFINGTFQQSTQELFIPNITVNNSGSYMCQAHNSATGLNRTTVTMITVSGSAPVLSAVATVGITIGVLARVALI

SEQ ID NO: 323 - protein, 488 aa, Homo sapiens
MAPAAWLRSAAARALLPPMLLLLLQPPPLLARALPPDVHHLHAERRGPQPWHAALPSSPAPAPATQEAPRPASSLRPPRCGVPDPSDGLSARNRQKRFVLSGGRWEKTDLTYRILRFPWQLVQEQVRQTMAEALKVWSDVTPLTFTEVHEGRADIMIDFARYWHGDDLPFDGPGGILAHAFFPKTHREGDVHFDYDETWTIGDDQGTDLLQVAAHEFGHVLGLQHTTAAKALMSAFYTFRYPLSLSPDDCRGVQHLYGQPWPTVTSRTPALGPQAGIDTNEIAPLEPDAPPDACEASFDAVSTIRGELFFFKAGFVWRLRGGQLQPGYPALASRHWQGLPSPVDAAFEDAQGHIWFFQGAQYWVYDGEKPVLGPAPLTELGLVRFPVHAALVWGPEKNKIYFFRGRDYWRFHPSTRRVDSPVPRRATDWRGVPSEIDAAFQDADGYAYFLRGRLYWKFDPVKVKALEGFPRLVGPDFFGCAEPANTFL

SEQ ID NO: 324 - protein, 469 aa, Homo sapiens
MHSFPPLLLLLFWGVVSHSFPATLETQEQDVDLVQKYLEKYYNLKNDGRQVEKRRNSGPVVEKLKQMQEFFGLKVTGKPDAETLKVMKQPRCGVPDVAQFVLTEGNPRWEQTHLTYRIENYTPDLPRADVDHAIEKAFQLWSNVTPLTFTKVSEGQADIMISFVRGDHRDNSPFDGPGGNLAHAFQPGPGIGGDAHFDEDERWTNNFREYNLHRVAAHELGHSLGLSHSTDIGALMYPSYTFSGDVQLAQDDIDGIQAIYGRSQNPVQPIGPQTPKACDSKLTFDAITTIRGEVMFFKDRFYMRTNPFYPEVELNFISVFWPQLPNGLEAAYEFADRDEVRFFKGNKYWAVQGQNVLHGYPKDIYSSFGFPRTVKHIDAALSEENTGKTYFFVANKYWRYDEYKRSMDPGYPKMIAHDFPGIGHKVDAVFMKDGFFYFFHGTRQYKFDPKTKRILTLQKANSWFNCRKN

SEQ ID NO: 325 - protein, 471 aa, Homo sapiens
MHPGVLAAFLFLSWTHCRALPLPSGGDEDDLSEEDLQFAERYLRSYYHPTNLAGILKENAASSMTERLREMQSFFGLEVTGKLDDNTLDVMKKPRCGVPDVGEYNVFPRTLKWSKMNLTYRIVNYTPDMTHSEVEKAFKKAFKVWSDVTPLNFTRLHDGIADIMISFGIKEHGDFYPFDGPSGLLAHAFPPGPNYGGDAHFDDDETWTSSSKGYNLFLVAAHEFGHSLGLDHSKDPGALMFPIYTYTGKSHFMLPDDDVQGIQSLYGPGDEDPNPKHPKTPDKCDPSLSLDAITSLRGETMIFKDRFFWRLHPQQVDAELFLTKSFWPELPNRIDAAYEHPSHDLIFIFRGRKFWALNGYDILEGYPKKISELGLPKEVKKISAAVHFEDTGKTLLFSGNQVWRYDDTNHIMDKDYPRLIEEDFPGIGDKVDAVYEKNGYIYFFNGPIQFEYSIWSNRIVRVMPANSILWC

SEQ ID NO: 326 - protein, 418 aa, Homo sapiens
MRSLLLLSAFCLLEAALAAEVKKPAAAAAPGTAEKLSPKAATLAERSAGLAFSLYQAMAKDQAVENILVSPVVVASSLGLVSLGGKATTASQAKAVLSAEQLRDEEVHAGLGELLRSLSNSTARNVTWKLGSRLYGPSSVSFADDFVRSSKQHYNCEHSKINFRDKRSALQSINEWAAQTTDGKLPEVTKDVERTDGALLVNAMFFKPHWDEKFHHKMVDNRGFMVTRSYTVGVMMMHRTGLYNYYDDEKEKLQIVEMPLAHKLSSLIILMPHHVEPLERLEKLLTKEQLKIWMGKMQKKAVAISLPKGVVEVTHDLQKHLAGLGLTEAIDKNKADLSRMSGKKDLYLASVFHATAFELDTDGNPFDQDIYGREELRSPKLFYADHPFIFLVRDTQSGSLLFIGRLVRPKGDKMRDEL

SEQ ID NO: 327 - protein, 314 aa, Homo sapiens
MDAFKGGMSLERLPEGLRPPPPPPHDMGPAFHLARPADPREPLENSASESSDTELPEKERGGEPKGPEDSGAGGTGCGGADDPAKKKKQRRQRTHFTSQQLQELEATFQRNRYPDMSMREEIAVWTNLTEPRVRVWFKNRRAKWRKRERNQQLDLCKGGYVPQFSGLVQPYEDVYAAGYSYNNWAAKSLAPAPLSTKSFTFFNSMSPLSSQSMFSAPSSISSMTMPSSMGPGAVPGMPNSGLNNINNLTGSSLNSAMSPGACPYGTPASPYSVYRDTCNSSLASLRLKSKQHSSFGYGALQGPASGLNACQYNS

SEQ ID NO: 328 - protein, 2828 aa, Homo sapiens
MPKRAHWGALSVVLILLWGHPRVALACPHPCACYVPSEVHCTFRSLASVPAGIARHVERINLGFNSIQALSETSFAGLTKLELLMIHGNEIPSIPDGALRDLSSLQVFKFSYNKLRVITGQTLQGLSNLMRLHIDHNKIEFIHPQAFNGLTSLRLLHLEGNLLHQLHPSTFSTFTFLDYFRLSTIRHLYLAENMVRTLPASMLRNMPLLENLYLQGNPWTCDCEMRWFLEWDAKSRGILKCKKDKAYEGGQLCAMCFSPKKLYKHEIHKLKDMTCLKPSIESPLRQNRSRSIEEEQEQEEDGGSQLILEKFQLPQWSISLNMTDEHGNMVNLVCDIKKPMDVYKIHLNQTDPPDIDINATVALDFECPMTRENYEKLWKLIAYYSEVPVKLHRELMLSKDPRVSYQYRQDADEEALYYTGVRAQILAEPEWVMQPSIDIQLNRRQSTAKKVLLSYYTQYSQTISTKDTRQARGRSWVMIEPSGAVQRDQTVLEGGPCQLSCNVKASESPSIFWVLPDGSILKAPMDDPDSKFSILSSGWLRIKSMEPSDSGLYQCIAQVRDEMDRMVYRVLVQSPSTQPAEKDTVTIGKNPGESVTLPCNALAIPEAHLSWILPNRRIINDLANTSHVYMLPNGTLSIPKVQVSDSGYYRCVAVNQQGADHFTVGITVTKKGSGLPSKRGRRPGAKALSRVREDIVEDEGGSGMGDEENTSRRLLHPKDQEVFLKTKDDAINGDKKAKKGRRKLKLWKHSEKEPETNVAEGRRVFESRRRINMANKQINPERWADILAKVRGKNLPKGTEVPPLIKTTSPPSLSLEVTPPFPAVSPPSASPVQTVTSAEESSADVPLLGEEEHVLGTISSASMGLEHNHNGVILVEPEVTSTPLEEVVDDLSEKTEEITSTEGDLKGTAAPTLISEPYEPSPTLHTLDTVYEKPTHEETATEGWSAADVGSSPEPTSSEYEPPLDAVSLAESEPMQYFDPDLETKSQPDEDKMKEDTFAHLTPTPTIWVNDSSTSQLFEDSTIGEPGVPGQSHLQGLTDNIHLVKSSLSTQDTLLIKKGMKEMSQTLQGGNMLEGDPTHSRSSESEGQESKSITLPDSTLGIMSSMSPVKKPAETTVGTLLDKDTTTVTTTPRQKVAPSSTMSTHPSRRRPNGRRRLRPNKFRHRHKQTPPTTFAPSETFSTQPTQAPDIKISSQVESSLVPTAWVDNTVNTPKQLEMEKNAEPTSKGTPRRKHGKRPNKHRYTPSTVSSRASGSKPSPSPENKHRNIVTPSSETILLPRTVSLKTEGPYDSLDYMTTTRKIYSSYPKVQETLPVTYKPTSDGKEIKDDVATNVDKHKSDILVTGESITNAIPTSRSLVSTMGEFKEESSPVGFPGTPTWNPSRTAQPGRLQTDIPVTTSGENLTDPPLLKELEDVDFTSEFLSSLTVSTPFHQEEAGSSTTLSSIKVEVASSQAETTTLDQDHLETTVAILLSETRPQNHTPTAARMKEPASSSPSTILMSLGQTTTTKPALPSPRISQASRDSKENVFLNYVGNPETEATPVNNEGTQHMSGPNELSTPSSDRDAFNLSTKLELEKQVFGSRSLPRGPDSQRQDGRVHASHQLTRVPAKPILPTATVRLPEMSTQSASRYFVTSQSPRHWTNKPEITTYPSGALPENKQFTTPRLSSTTIPLPLHMSKPSIPSKFTDRRTDQFNGYSKVFGNNNIPEARNPVGKPPSPRIPHYSNGRLPFFTNKTLSFPQLGVTRRPQIPTSPAPVMRERKVIPGSYNRIHSHSTFHLDFGPPAPPLLHTPQTTGSPSTNLQNIPMVSSTQSSISFITSSVQSSGSFHQSSSKFFAGGPPASKFWSLGEKPQILTKSPQTVSVTAETDTVFPCEATGKPKPFVTWTKVSTGALMTPNTRIQRFEVLKNGTLVIRKVQVQDRGQYMCTASNLHGLDRMVVLLSVTVQQPQILASHYQDVTVYLGDTIAMECLAKGTPAPQISWIFPDRRVWQTVSPVESRITLHENRTLSIKEASFSDRGVYKCVASNAAGADSLAIRLHVAALPPVIHQEKLENISLPPGLSIHIHCTAKAAPLPSVRWVLGDGTQIRPSQFLHGNLFVFPNGTLYIRNLAPKDSGRYECVAANLVGSARRTVQLNVQRAAANARITGTSPRRTDVRYGGTLKLDCSASGDPWPRILWRLPSKRMIDALFSFDSRIKVFANGTLVVKSVTDKDAGDYLCVARNKVGDDYVVLKVDVVMKPAKIEHKEENDHKVFYGGDLKVDCVATGLPNPEISWSLPDGSLVNSFMQSDDSGGRTKRYVVFNNGTLYFNEVGMREEGDYTCFAENQVGKDEMRVRVKVVTAPATIRNKTYLAVQVPYGDVVTVACEAKGEPMPKVTWLSPTNKVIPTSSEKYQIYQDGTLLIQKAQRSDSGNYTCLVRNSAGEDRKTVWIHVNVQPPKINGNPNPITTVREIAAGGSRKLIDCKAEGIPTPRVLWAFPEGVVLPAPYYGNRITVHGNGSLDIRSLRKSDSVQLVCMARNEGGEARLIVQLTVLEPMEKPIFHDPISEKITAMAGHTISLNCSAAGTPTPSLVWVLPNGTDLQSGQQLQRFYHKADGMLHISGLSSVDAGAYRCVARNAAGHTERLVSLKVGLKPEANKQYHNLVSIINGETLKLPCTPPGAGQGRFSWTLPNGMHLEGPQTLGRVSLLDNGTLTVREASVFDRGTYVCRMETEYGPSVTSIPVIVIAYPPRITSEPTPVIYTRPGNTVKLNCMAMGIPKADITWELPDKSHLKAGVQARLYGNRFLHPQGSLTIQHATQRDAGFYKCMAKNILGSDSKTTYIHVF

SEQ ID NO: 329 - protein, 426 aa, Homo sapiens
MPLLWLRGFLLASCWIIVRSSPTPGSEGHSAAPDCPSCALAALPKDVPNSQPEMVEAVKKHILNMLHLKKRPDVTQPVPKAALLNAIRKLHVGKVGENGYVEIEDDIGRRAEMNELMEQTSEIITFAESGTARKTLHFEISKEGSDLSVVERAEVWLFLKVPKANRTRTKVTIRLFQQQKHPQGSLDTGEEAEEVGLKGERSELLLSEKVVDARKSTWHVFPVSSSIQRLLDQGKSSLDVRIACEQCQESGASLVLLGKKKKKEEEGEGKKKGGGEGGAGADEEKEQSHRPFLMLQARQSEDHPHRRRRRGLECDGKVNICCKKQFFVSFKDIGWNDWIIAPSGYHANYCEGECPSHIAGTSGSSLSFHSTVINHYRMRGHSPFANLKSCCVPTKLRPMSMLYYDDGQNIIKKDIQNMIVEECGCS

SEQ ID NO: 330 - protein, 6792 aa, Homo sapiens
MFINIKSILWMCSTLIVTHALHKVKVGKSPPVRGSLSGKVSLPCHFSTMPTLPPSYNTSEFLRIKWSKIEVDKNGKDLKETTVLVAQNGNIKIGQDYKGRVSVPTHPEAVGDASLTVVKLLASDAGLYRCDVMYGIEDTQDTVSLTVDGVVFHYRAATSRYTLNFEAAQKACLDVGAVIATPEQLFAAYEDGFEQCDAGWLADQTVRYPIRAPRVGCYGDKMGKAGVRTYGFRSPQETYDVYCYVDHLDGDVFHLTVPSKFTFEEAAKECENQDARLATVGELQAAWRNGFDQCDYGWLSDASVRHPVTVARAQCGGGLLGVRTLYRFENQTGFPPPDSRFDAYCFKPKEATTIDLSILAETASPSLSKEPQMVSDRTTPIIPLVDELPVIPTEFPPVGNIVSFEQKATVQPQAITDSLATKLPTPTGSTKKPWDMDDYSPSASGPLGKLDISEIKEEVLQSTTGVSHYATDSWDGVVEDKQTQESVTQIEQIEVGPLVTSMEILKHIPSKEFPVTETPLVTARMILESKTEKKMVSTVSELVTTGHYGFTLGEEDDEDRTLTVGSDESTLIFDQIPEVITVSKTSEDTIHTHLEDLESVSASTTVSPLIMPDNNGSSMDDWEERQTSGRITEEFLGKYLSTTPFPSQHRTEIELFPYSGDKILVEGISTVIYPSLQTEMTHRRERTETLIPEMRTDTYTDEIQEEITKSPFMGKTEEEVFSGMKLSTSLSEPIHVTESSVEMTKSFDFPTLITKLSAEPTEVRDMEEDFTATPGTTKYDENITTVLLAHGTLSVEAATVSKWSWDEDNTTSKPLESTEPSASSKLPPALLTTVGMNGKDKDIPSFTEDGADEFTLIPDSTQKQLEEVTDEDIAAHGKFTIRFQPTTSTGIAEKSTLRDSTTEEKVPPITSTEGQVYATMEGSALGEVEDVDLSKPVSTVPQFAHTSEVEGLAFVSYSSTQEPTTYVDSSHTIPLSVIPKTDWGVLVPSVPSEDEVLGEPSQDILVIDQTRLEATISPETMRTTKITEGTTQEEFPWKEQTAEKPVPALSSTAWTPKEAVTPLDEQEGDGSAYTVSEDELLTGSERVPVLETTPVGKIDHSVSYPPGAVTEHKVKTDEVVTLTPRIGPKVSLSPGPEQKYETEGSSTTGFTSSLSPFSTHITQLMEETTTEKTSLEDIDLGSGLFEKPKATELIEFSTIKVTVPSDITTAFSSVDRLHTTSAFKPSSAITKKPPLIDREPGEETTSDMVIIGESTSHVPPTTLEDIVAKETETDIDREYFTTSSPPATQPTRPPTVEDKEAFGPQALSTPQPPASTKFHPDINVYIIEVRENKTGRMSDLSVIGHPIDSESKEDEPCSEETDPVHDLMAEILPEFPDIIEIDLYHSEENEEEEEECANATDVTTTPSVQYINGKHLVTTVPKDPEAAEARRGQFESVAPSQNFSDSSESDTHPFVIAKTELSTAVQPNESTETTESLEVTWKPETYPETSEHFSGGEPDVFPTVPFHEEFESGTAKKGAESVTERDTEVGHQAHEHTEPVSLFPEESSGEIAIDQESQKIAFARATEVTFGEEVEKSTSVTYTPTIVPSSASAYVSEEEAVTLIGNPWPDDLLSTKESWVEATPRQVVELSGSSSIPITEGSGEAEEDEDTMFTMVTDLSQRNTTDTLITLDTSRIITESFFEVPATTIYPVSEQPSAKVVPTKFVSETDTSEWISSTTVEEKKRKEEEGTTGTASTFEVYSSTQRSDQLILPFELESPNVATSSDSGTRKSFMSLTTPTQSEREMTDSTPVFTETNTLENLGAQTTEHSSIHQPGVQEGLTTLPRSPASVFMEQGSGEAAADPETTTVSSFSLNVEYAIQAEKEVAGTLSPHVETTFSTEPTGLVLSTVMDRVVAENITQTSREIVISERLGEPNYGAEIRGFSTGFPLEEDFSGDFREYSTVSHPIAKEETVMMEGSGDAAFRDTQTSPSTVPTSVHISHISDSEGPSSTMVSTSAFPWEEFTSSAEGSGEQLVTVSSSVVPVLPSAVQKFSGTASSIIDEGLGEVGTVNEIDRRSTILPTAEVEGTKAPVEKEEVKVSGTVSTNFPQTIEPAKLWSRQEVNPVRQEIESETTSEEQIQEEKSFESPQNSPATEQTIFDSQTFTETELKTTDYSVLTTKKTYSDDKEMKEEDTSLVNMSTPDPDANGLESYTTLPEATEKSHFFLATALVTESIPAEHVVTDSPIKKEESTKHFPKGMRPTIQESDTELLFSGLGSGEEVLPTLPTESVNFTEVEQINNTLYPHTSQVESTSSDKIEDFNRMENVAKEVGPLVSQTDIFEGSGSVTSTTLIEILSDTGAEGPTVAPLPFSTDIGHPQNQTVRWAEEIQTSRPQTITEQDSNKNSSTAEINETTTSSTDFLARAYGFEMAKEFVTSAPKPSDLYYEPSGEGSGEVDIVDSFHTSATTQATRQESSTTFVSDGSLEKHPEVPSAKAVTADGFPTVSVMLPLHSEQNKSSPDPTSTLSNTVSYERSTDGSFQDRFREFEDSTLKPNRKKPTENIIIDLDKEDKDLILTITESTILEILPELTSDKNTIIDIDHTKPVYEDILGMQTDIDTEVPSEPHDSNDESNDDSTQVQEIYEAAVNLSLTEETFEGSADVLASYTQATHDESMTYEDRSQLDHMGFHFTTGIPAPSTETELDVLLPTATSLPIPRKSATVIPEIEGIKAEAKALDDMFESSTLSDGQAIADQSEIIPTLGQFERTQEEYEDKKHAGPSFQPEFSSGAEEALVDHTPYLSIATTHLMDQSVTEVPDVMEGSNPPYYTDTTLAVSTFAKLSSQTPSSPLTIYSGSEASGHTEIPQPSALPGIDVGSSVMSPQDSFKEIHVNIEATFKPSSEEYLHITEPPSLSPDTKLEPSEDDGKPELLEEMEASPTELIAVEGTEILQDFQNKTDGQVSGEAIKMFPTIKTPEAGTVITTADEIELEGATQWPHSTSASATYGVEAGVVPWLSPQTSERPTLSSSPEINPETQAALIRGQDSTIAASEQQVAARILDSNDQATVNPVEFNTEVATPPFSLLETSNETDFLIGINEESVEGTAIYLPGPDRCKMNPCLNGGTCYPTETSYVCTCVPGYSGDQCELDFDECHSNPCRNGATCVDGFNTFRCLCLPSYVGALCEQDTETCDYGWHKFQGQCYKYFAHRRTWDAAERECRLQGAHLTSILSHEEQMFVNRVGHDYQWIGLNDKMFEHDFRWTDGSTLQYENWRPNQPDSFFSAGEDCVVIIWHENGQWNDVPCNYHLTYTCKKGTVACGQPPVVENAKTFGKMKPRYEINSLIRYHCKDGFIQRHLPTIRCLGNGRWAIPKITCMNPSAYQRTYSMKYFKNSSSAKDNSINTSKHDHRWSRRWQESRRMFINIKSILWMCSTLIVTHALHKVKVGKSPPVRGSLSGKVSLPCHFSTMPTLPPSYNTSEFLRIKWSKIEVDKNGKDLKETTVLVAQNGNIKIGQDYKGRVSVPTHPEAVGDASLTVVKLLASDAGLYRCDVMYGIEDTQDTVSLTVDGVVFHYRAATSRYTLNFEAAQKACLDVGAVIATPEQLFAAYEDGFEQCDAGWLADQTVRYPIRAPRVGCYGDKMGKAGVRTYGFRSPQETYDVYCYVDHLDGDVFHLTVPSKFTFEEAAKECENQDARLATVGELQAAWRNGFDQCDYGWLSDASVRHPVTVARAQCGGGLLGVRTLYRFENQTGFPPPDSRFDAYCFKPKEATTIDLSILAETASPSLSKEPQMVSDRTTPIIPLVDELPVIPTEFPPVGNIVSFEQKATVQPQAITDSLATKLPTPTGSTKKPWDMDDYSPSASGPLGKLDISEIKEEVLQSTTGVSHYATDSWDGVVEDKQTQESVTQIEQIEVGPLVTSMEILKHIPSKEFPVTETPLVTARMILESKTEKKMVSTVSELVTTGHYGFTLGEEDDEDRTLTVGSDESTLIFDQIPEVITVSKTSEDTIHTHLEDLESVSASTTVSPLIMPDNNGSSMDDWEERQTSGRITEEFLGKYLSTTPFPSQHRTEIELFPYSGDKILVEGISTVIYPSLQTEMTHRRERTETLIPEMRTDTYTDEIQEEITKSPFMGKTEEEVFSGMKLSTSLSEPIHVTESSVEMTKSFDFPTLITKLSAEPTEVRDMEEDFTATPGTTKYDENITTVLLAHGTLSVEAATVSKWSWDEDNTTSKPLESTEPSASSKLPPALLTTVGMNGKDKDIPSFTEDGADEFTLIPDSTQKQLEEVTDEDIAAHGKFTIRFQPTTSTGIAEKSTLRDSTTEEKVPPITSTEGQVYATMEGSALGEVEDVDLSKPVSTVPQFAHTSEVEGLAFVSYSSTQEPTTYVDSSHTIPLSVIPKTDWGVLVPSVPSEDEVLGEPSQDILVIDQTRLEATISPETMRTTKITEGTTQEEFPWKEQTAEKPVPALSSTAWTPKEAVTPLDEQEGDGSAYTVSEDELLTGSERVPVLETTPVGKIDHSVSYPPGAVTEHKVKTDEVVTLTPRIGPKVSLSPGPEQKYETEGSSTTGFTSSLSPFSTHITQLMEETTTEKTSLEDIDLGSGLFEKPKATELIEFSTIKVTVPSDITTAFSSVDRLHTTSAFKPSSAITKKPPLIDREPGEETTSDMVIIGESTSHVPPTTLEDIVAKETETDIDREYFTTSSPPATQPTRPPTVEDKEAFGPQALSTPQPPASTKFHPDINVYIIEVRENKTGRMSDLSVIGHPIDSESKEDEPCSEETDPVHDLMAEILPEFPDIIEIDLYHSEENEEEEEECANATDVTTTPSVQYINGKHLVTTVPKDPEAAEARRGQFESVAPSQNFSDSSESDTHPFVIAKTELSTAVQPNESTETTESLEVTWKPETYPETSEHFSGGEPDVFPTVPFHEEFESGTAKKGAESVTERDTEVGHQAHEHTEPVSLFPEESSGEIAIDQESQKIAFARATEVTFGEEVEKSTSVTYTPTIVPSSASAYVSEEEAVTLIGNPWPDDLLSTKESWVEATPRQVVELSGSSSIPITEGSGEAEEDEDTMFTMVTDLSQRNTTDTLITLDTSRIITESFFEVPATTIYPVSEQPSAKVVPTKFVSETDTSEWISSTTVEEKKRKEEEGTTGTASTFEVYSSTQRSDQLILPFELESPNVATSSDSGTRKSFMSLTTPTQSEREMTDSTPVFTETNTLENLGAQTTEHSSIHQPGVQEGLTTLPRSPASVFMEQGSGEAAADPETTTVSSFSLNVEYAIQAEKEVAGTLSPHVETTFSTEPTGLVLSTVMDRVVAENITQTSREIVISERLGEPNYGAEIRGFSTGFPLEEDFSGDFREYSTVSHPIAKEETVMMEGSGDAAFRDTQTSPSTVPTSVHISHISDSEGPSSTMVSTSAFPWEEFTSSAEGSGEQLVTVSSSVVPVLPSAVQKFSGTASSIIDEGLGEVGTVNEIDRRSTILPTAEVEGTKAPVEKEEVKVSGTVSTNFPQTIEPAKLWSRQEVNPVRQEIESETTSEEQIQEEKSFESPQNSPATEQTIFDSQTFTETELKTTDYSVLTTKKTYSDDKEMKEEDTSLVNMSTPDPDANGLESYTTLPEATEKSHFFLATALVTESIPAEHVVTDSPIKKEESTKHFPKGMRPTIQESDTELLFSGLGSGEEVLPTLPTESVNFTEVEQINNTLYPHTSQVESTSSDKIEDFNRMENVAKEVGPLVSQTDIFEGSGSVTSTTLIEILSDTGAEGPTVAPLPFSTDIGHPQNQTVRWAEEIQTSRPQTITEQDSNKNSSTAEINETTTSSTDFLARAYGFEMAKEFVTSAPKPSDLYYEPSGEGSGEVDIVDSFHTSATTQATRQESSTTFVSDGSLEKHPEVPSAKAVTADGFPTVSVMLPLHSEQNKSSPDPTSTLSNTVSYERSTDGSFQDRFREFEDSTLKPNRKKPTENIIIDLDKEDKDLILTITESTILEILPELTSDKNTIIDIDHTKPVYEDILGMQTDIDTEVPSEPHDSNDESNDDSTQVQEIYEAAVNLSLTEETFEGSADVLASYTQATHDESMTYEDRSQLDHMGFHFTTGIPAPSTETELDVLLPTATSLPIPRKSATVIPEIEGIKAEAKALDDMFESSTLSDGQAIADQSEIIPTLGQFERTQEEYEDKKHAGPSFQPEFSSGAEEALVDHTPYLSIATTHLMDQSVTEVPDVMEGSNPPYYTDTTLAVSTFAKLSSQTPSSPLTIYSGSEASGHTEIPQPSALPGIDVGSSVMSPQDSFKEIHVNIEATFKPSSEEYLHITEPPSLSPDTKLEPSEDDGKPELLEEMEASPTELIAVEGTEILQDFQNKTDGQVSGEAIKMFPTIKTPEAGTVITTADEIELEGATQWPHSTSASATYGVEAGVVPWLSPQTSERPTLSSSPEINPETQAALIRGQDSTIAASEQQVAARILDSNDQATVNPVEFNTEVATPPFSLLETSNETDFLIGINEESVEGTAIYLPGPDRCKMNPCLNGGTCYPTETSYVCTCVPGYSGDQCELDFDECHSNPCRNGATCVDGFNTFRCLCLPSYVGALCEQDTETCDYGWHKFQGQCYKYFAHRRTWDAAERECRLQGAHLTSILSHEEQMFVNRVGHDYQWIGLNDKMFEHDFRWTDGSTLQYENWRPNQPDSFFSAGEDCVVIIWHENGQWNDVPCNYHLTYTCKKGTVACGQPPVVENAKTFGKMKPRYEINSLIRYHCKDGFIQRHLPTIRCLGNGRWAIPKITCMNPSAYQRTYSMKYFKNSSSAKDNSINTSKHDHRWSRRWQESRR

SEQ ID NO: 331 - DNA, 24 bp, Homo sapiens
tcctgccctaagagccatagggaa

SEQ ID NO: 332 - DNA, 23 bp, Homo sapiens
gagcttctgaattgccaattgtg

SEQ ID NO: 333 - DNA, 26 bp, Homo sapiens
gagtctgttcatctgtaccagtgaca

SEQ ID NO: 334 - DNA, 32 bp, Homo sapiens
ctgcagctgacaaaattcctgggttactaggt

SEQ ID NO: 335 - DNA, 21 bp, Homo sapiens
gcattcttagaacgcggttca

SEQ ID NO: 336 - DNA, 21 bp, Homo sapiens
ttggatgcaatcagcttctga

SEQ ID NO: 337 - DNA, 25 bp, Homo sapiens
tctcgcttccgcttcgcagtttttg

SEQ ID NO: 338 - DNA, 19 bp, Homo sapiens
gcaggtagttgccgaagca

SEQ ID NO: 339 - DNA, 22 bp, Homo sapiens
tggaggagtctcgtcactttca

SEQ ID NO: 340 - DNA, 26 bp, Homo sapiens
tctccattaggcacattcagtccact

SEQ ID NO: 341 - DNA, 21 bp, Homo sapiens
gggtgggaagaaagaatgcaa

SEQ ID NO: 342 - DNA, 19 bp, Homo sapiens
acccaggaagcccctcatc

SEQ ID NO: 343 - DNA, 27 bp, Homo sapiens
ccaaaggaaccaaatcagaacagctca

SEQ ID NO: 344 - DNA, 22 bp, Homo sapiens
ccaaggacaacagtggtgaaaa

SEQ ID NO: 345 - DNA, 26 bp, Homo sapiens
gaaattggtgagactgtcaaattcag

SEQ ID NO: 346 - DNA, 27 bp, Homo sapiens
agtcgccacagatgtacccactagccc

SEQ ID NO: 347 - DNA, 24 bp, Homo sapiens
ttctgtatacgcagctcagtttcc

SEQ ID NO: 348 - DNA, 20 bp, Homo sapiens
cttccgctgactcacagcaa

SEQ ID NO: 349 - DNA, 26 bp, Homo sapiens
aagagcttgacccaagtccgagccat

SEQ ID NO: 350 - DNA, 21 bp, Homo sapiens
cactcatgccaggacattggt

SEQ ID NO: 351 - DNA, 25 bp, Homo sapiens
caaacttaagctccccagagtacat

SEQ ID NO: 352 - DNA, 32 bp, Homo sapiens
caagaaaaccacctaaatatgaaagattcatc

SEQ ID NO: 353 - DNA, 21 bp, Homo sapiens
tgctttgttggagatggcttt

SEQ ID NO: 354 - DNA, 19 bp, Homo sapiens
ttgaaacgcaagcccattg

SEQ ID NO: 355 - DNA, 29 bp, Homo sapiens
aacttaactaaattcatcgccatcaagaa

SEQ ID NO: 356 - DNA, 21 bp, Homo sapiens
tggccaagaatgtggtgaaag

SEQ ID NO: 357 - DNA, 20 bp, Homo sapiens
tcaggagtttgctgcttgca

SEQ ID NO: 358 - DNA, 27 bp, Homo sapiens
agaagatccccccagtcaacaccaacc

SEQ ID NO: 359 - DNA, 25 bp, Homo sapiens
tccttgagctagacctctcctacaa

SEQ ID NO: 360 - DNA, 24 bp, Homo sapiens
actcattgatcctattgccttgga

SEQ ID NO: 361 - DNA, 22 bp, Homo sapiens
catccaacgccgtcgctgtgac

SEQ ID NO: 362 - DNA, 21 bp, Homo sapiens
tgtctttgccaatgtcgctta

SEQ ID NO: 363 - DNA, 21 bp, Homo sapiens
aacagaaatgggcatgatcca

SEQ ID NO: 364 - DNA, 20 bp, Homo sapiens
tcggatgcccagctcagccg

SEQ ID NO: 365 - DNA, 20 bp, Homo sapiens
tgcgtcaacgtgctcaagag

SEQ ID NO: 366 - DNA, 22 bp, Homo sapiens
ggcacttgatggtcagcagtac

SEQ ID NO: 367 - DNA, 28 bp, Homo sapiens
aaagtgagaccctccaccttgtccaggt

SEQ ID NO: 368 - DNA, 21 bp, Homo sapiens
gctgatccagcctcactatgc

SEQ ID NO: 369 - DNA, 21 bp, Homo sapiens
agatccttgcagcaccagttg

SEQ ID NO: 370 - DNA, 21 bp, Homo sapiens
catgccatgcagtgcgttcag

SEQ ID NO: 371 - DNA, 22 bp, Homo sapiens
gtgtgccctgctatgagaaaca

SEQ ID NO: 372 - DNA, 17 bp, Homo sapiens
cccctcccgtggtgatg

SEQ ID NO: 373 - DNA, 29 bp, Homo sapiens
agccaggagacgtacctttaccacataga

SEQ ID NO: 374 - DNA, 20 bp, Homo sapiens
gggaggacaacagcgatgag

SEQ ID NO: 375 - DNA, 19 bp, Homo sapiens
ccccgtagaggctgtcgtt

SEQ ID NO: 376 - DNA, 28 bp, Homo sapiens
cacagctacggtgacatttctgccactg

SEQ ID NO: 377 - DNA, 24 bp, Homo sapiens
aaatccgttcagtgatcagacaga

SEQ ID NO: 378 - DNA, 26 bp, Homo sapiens
cagatcaaatgaacaagaaacttcca

SEQ ID NO: 379 - DNA, 30 bp, Homo sapiens
tctcagaatgcacaaaaagaaagtgacgca

SEQ ID NO: 380 - DNA, 20 bp, Homo sapiens
tgaacatggacggcaaagag

SEQ ID NO: 381 - DNA, 21 bp, Homo sapiens
ccaatcacagcatgggttcag

SEQ ID NO: 382 - DNA, 20 bp, Homo sapiens
caggtggaaaaggccaaggt

SEQ ID NO: 383 - DNA, 21 bp, Homo sapiens
aagagcatccagcaacaacca

SEQ ID NO: 384 - DNA, 16 bp, Homo sapiens
ccaagcgccgtggcca

SEQ ID NO: 385 - DNA, 29 bp, Homo sapiens
tctataccatccttattcaaaacttgcat

SEQ ID NO: 386 - DNA, 19 bp, Homo sapiens
gtgccaccaacccattttg

SEQ ID NO: 387 - DNA, 29 bp, Homo sapiens
gtatttcctaaatggtacctgtatatgca

SEQ ID NO: 388 - DNA, 28 bp, Homo sapiens
acaggcaatatcaatcttcctccgggct

SEQ ID NO: 389 - DNA, 20 bp, Homo sapiens
ccccaggcgctaatagatca

SEQ ID NO: 390 - DNA, 21 bp, Homo sapiens
ctgctccaacatttggtttcc

SEQ ID NO: 391 - DNA, 19 bp, Homo sapiens
atgcccttttgccgatgca

SEQ ID NO: 392 - DNA, 24 bp, Homo sapiens
gccaaattgtgtttgatggattaa

SEQ ID NO: 393 - DNA, 27 bp, Homo sapiens
gacaaaaccgagtcacatcagtaatag

SEQ ID NO: 394 - DNA, 27 bp, Homo sapiens
tccccctgaaaagtgagcagcaacgta

SEQ ID NO: 395 - DNA, 25 bp, Homo sapiens
cagatttgagctatcagaccaacaa

SEQ ID NO: 396 - DNA, 25 bp, Homo sapiens
aaattcaagagaggcttcacatacg

SEQ ID NO: 397 - DNA, 24 bp, Homo sapiens
cgttctgcaagcatcagttctacg

SEQ ID NO: 398 - DNA, 27 bp, Homo sapiens
agagaaaaacaaaacccctaagagact

SEQ ID NO: 399 - DNA, 24 bp, Homo sapiens
gcacaaggaaatcttgttgatgat

SEQ ID NO: 400 - DNA, 23 bp, Homo sapiens
ccacagcatgaagggcaaccagc

SEQ ID NO: 401 - DNA, 19 bp, Homo sapiens
gccctgtcacgctgtacga

SEQ ID NO: 402 - DNA, 22 bp, Homo sapiens
tcttgtctttgcggtatttcca

SEQ ID NO: 403 - DNA, 24 bp, Homo sapiens
ttgatagaaacgctgtgagctcga

SEQ ID NO: 404 - DNA, 22 bp, Homo sapiens
agctcatcaaggcaattggttt

SEQ ID NO: 405 - DNA, 28 bp, Homo sapiens
acaagatcatgcaagttatcaagaagtt

SEQ ID NO: 406 - DNA, 27 bp, Homo sapiens
atgaaggtacagcccaagcaccttggg

SEQ ID NO: 407 - DNA, 25 bp, Homo sapiens
gctgtgaatttactggacagattcc

SEQ ID NO: 408 - DNA, 24 bp, Homo sapiens
aaataaaagcagctcagtccaaca

SEQ ID NO: 409 - DNA, 30 bp, Homo sapiens
atcctggcacagatttcagctcctactcca

SEQ ID NO: 410 - DNA, 19 bp, Homo sapiens
gaaggaggctggccacagt

SEQ ID NO: 411 - DNA, 20 bp, Homo sapiens
ttgaacgcaggaccttccat

SEQ ID NO: 412 - DNA, 38 bp, Homo sapiens
tgtacagaatatatccacatccgtccacaataaatcct

SEQ ID NO: 413 - DNA, 27 bp, Homo sapiens
taaaacagaaggaaactaatggacctt

SEQ ID NO: 414 - DNA, 25 bp, Homo sapiens
cagtccacttccatatgtgttgttc

SEQ ID NO: 415 - DNA, 21 bp, Homo sapiens
cacttcacgcaatgcttggca

SEQ ID NO: 416 - DNA, 19 bp, Homo sapiens
tgcgtgacttgccatgaga

SEQ ID NO: 417 - DNA, 24 bp, Homo sapiens
ggtaagtgattcctccagatgtga

SEQ ID NO: 418 - DNA, 24 bp, Homo sapiens
caaacagcccattaagttccctgg

SEQ ID NO: 419 - DNA, 25 bp, Homo sapiens
cagaaggtaaagccatgttttgact

SEQ ID NO: 420 - DNA, 21 bp, Homo sapiens
gggacagatggacaggaaggt

SEQ ID NO: 421 - DNA, 27 bp, Homo sapiens
ctgatgtggatgacccagaggcattcc

SEQ ID NO: 422 - DNA, 22 bp, Homo sapiens
accgacaagtcaagtgcttctg

SEQ ID NO: 423 - DNA, 24 bp, Homo sapiens
ggttgtcttatggcatccagttaa

SEQ ID NO: 424 - DNA, 28 bp, Homo sapiens
tttctgattctgcatgagaaccttcgca

SEQ ID NO: 425 - DNA, 19 bp, Homo sapiens
gagagcggagggcagaaga

SEQ ID NO: 426 - DNA, 19 bp, Homo sapiens
gagagcggagggcagaaga

SEQ ID NO: 427 - DNA, 22 bp, Homo sapiens
ccccacccctctgctggtcctg

SEQ ID NO: 428 - DNA, 20 bp, Homo sapiens
ccagatgccttggtccaaag

SEQ ID NO: 429 - DNA, 23 bp, Homo sapiens
gcagcttatagcaccaacacgtt

SEQ ID NO: 430 - DNA, 32 bp, Homo sapiens
cccaaagtttcataaagcccctaagctcatga

SEQ ID NO: 431 - DNA, 25 bp, Homo sapiens
aatggaaaacaacctctgagtttga

SEQ ID NO: 432 - DNA, 22 bp, Homo sapiens
tgtgggcaaagagttgatgaaa

SEQ ID NO: 433 - DNA, 21 bp, Homo sapiens
cttcgtgagtgtcccgtgcac

SEQ ID NO: 434 - DNA, 21 bp, Homo sapiens
ctcgtacctcagcatgccatt

SEQ ID NO: 435 - DNA, 20 bp, Homo sapiens
gtgccgaggcgtagatgaag

SEQ ID NO: 436 - DNA, 25 bp, Homo sapiens
acgtgcagtcaggtgtcttcataca

SEQ ID NO: 437 - DNA, 20 bp, Homo sapiens
catcggagtcggagcttagg

SEQ ID NO: 438 - DNA, 20 bp, Homo sapiens
ctcgccattcgactcttgct

SEQ ID NO: 439 - DNA, 26 bp, Homo sapiens
aattctaatgtagcaaaacgtaacca

SEQ ID NO: 440 - DNA, 25 bp, Homo sapiens
tgaaacgattagctgtagccaaatt

SEQ ID NO: 441 - DNA, 29 bp, Homo sapiens
cagtagatttaccacacatattgcatttt

SEQ ID NO: 442 - DNA, 39 bp, Homo sapiens
aacatagttttcctatttcaggcagagtgcggtatattc

SEQ ID NO: 443 - DNA, 29 bp, Homo sapiens
ggtgtacaagtcgtttttggtataacttc

SEQ ID NO: 444 - DNA, 27 bp, Homo sapiens
gctaagtgagtaggaaacagtgtttcc

SEQ ID NO: 445 - DNA, 26 bp, Homo sapiens
tgtttctacacctgtgctatggactc

SEQ ID NO: 446 - DNA, 23 bp, Homo sapiens
tgaagcagaacctccttcagaag

SEQ ID NO: 447 - DNA, 19 bp, Homo sapiens
tccaatttgggcagttcca

SEQ ID NO: 448 - DNA, 32 bp, Homo sapiens
attatccttcgaaaaacatccacagcagtctg

SEQ ID NO: 449 - DNA, 25 bp, Homo sapiens
agcttttttggaatcttctgctaaa

SEQ ID NO: 450 - DNA, 19 bp, Homo sapiens
gccccgtccattttttctg

SEQ ID NO: 451 - DNA, 28 bp, Homo sapiens
cagactagccatgacttgaatgccagca

SEQ ID NO: 452 - DNA, 29 bp, Homo sapiens
aaagagcgtatgaaaagtacgttagactt

SEQ ID NO: 453 - DNA, 27 bp, Homo sapiens
tgacaaacacgacataaataacacaca

SEQ ID NO: 454 - DNA, 29 bp, Homo sapiens
ttcccctgaaggatgctaaggaatacgct

SEQ ID NO: 455 - DNA, 24 bp, Homo sapiens
aacaagtgcgacctctcagatatt

SEQ ID NO: 456 - DNA, 20 bp, Homo sapiens
aaccacgatggcacctatgg

SEQ ID NO: 457 - DNA, 26 bp, Homo sapiens
cacctcatctaatataaaaaaggcaa

SEQ ID NO: 458 - DNA, 22 bp, Homo sapiens
tcaatacctgcagctggtgaat

SEQ ID NO: 459 - DNA, 28 bp, Homo sapiens
ggtgcatactgactagcattaaaatttt

SEQ ID NO: 460 - DNA, 27 bp, Homo sapiens
tcatcccctgactgtgtgaaaaaagta

SEQ ID NO: 461 - DNA, 25 bp, Homo sapiens
gaccaaatgtaattcggatcagatc

SEQ ID NO: 462 - DNA, 27 bp, Homo sapiens
gaaactctgtgacaatccttcactaga

SEQ ID NO: 463 - DNA, 25 bp, Homo sapiens
ttttgaaagatctccaccacaacgt

SEQ ID NO: 464 - DNA, 24 bp, Homo sapiens
cttgcttcctcattgacttcatgt

SEQ ID NO: 465 - DNA, 24 bp, Homo sapiens
ggcttgctgtgtctctctatcttg

SEQ ID NO: 466 - DNA, 17 bp, Homo sapiens
ccgccgcgtcccgaact

SEQ ID NO: 467 - DNA, 19 bp, Homo sapiens
gtgctgacgggacccttct

SEQ ID NO: 468 - DNA, 21 bp, Homo sapiens
acgagagcgaaactccatttg

SEQ ID NO: 469 - DNA, 23 bp, Homo sapiens
ccctgacttccgcaacatgacgg

SEQ ID NO: 470 - DNA, 21 bp, Homo sapiens
gctggctgacaacttcatcca

SEQ ID NO: 471 - DNA, 21 bp, Homo sapiens
gatggcattgcgagacagtgt

SEQ ID NO: 472 - DNA, 1270 bp, Homo sapiens
attttctaaaagggacagagagcaccctgctacatttcctaatcaagaagttggcgtgcagctgggagagctagactaagttggtcatgatgcagaagctactcaaatgcagtcggcttgtcctggctcttgccctcatcctggttctggaatcctcagttcaaggttatcctacgcggagagccaggtaccaatgggtgcgctgcaatccagacagtaattctgcaaactgccttgaagaaaaaggaccaatgttcgaactacttccaggtgaatccaacaagatcccccgtctgaggactgacctttttccaaagacgagaatccaggacttgaatcgtatcttcccactttctgaggactactctggatcaggcttcggctccggctccggctctggatcaggatctgggagtggcttcctaacggaaatggaacaggattaccaactagtagacgaaagtgatgctttccatgacaaccttaggtctcttgacaggaatctgccctcagacagccaggacttgggtcaacatggattagaagaggattttatgttataaaagaggattttcccaccttgacaccaggcaatgtagttagcatattttatgtaccatggttatatgattaatcttgggacaaagaattttatagaaatttttaaacatctgaaaaagaagcttaagttttatcatccttttttttctcatgaattcttaaaggattatgctttaatgctgttatctattttattgttcttgaaaatacctgcattttttggtatcatgttcaaccaacatcattatgaaattaattagattcccatggccataaaatggctttaaagaatatatatatatttttaaagtagcttgagaagcaaattggcaggtaatatttcatacctaaattaagactctgacttggattgtgaattataatgatatgccccttttcttataaaaacaaaaaaaaaaataatgaaacacagtgaatttgtagagtgggggtatttgacatattttacagggtggagtgtactatatactattacctttgaatgtgtttgcagagctagtggatgtgtttgtctacaagtatgattgctgttacataacaccccaaattaactcccaaattaaaacacagttgtgctgtcaatacctcatactgctttacctttttttcctggatatctgtgtattttcaaatgttactatatattaaagcagaaatataaccaaaggttaaaaaaaaaaaaaaaaaa

SEQ ID NO: 473 - DNA, 2881 bp, Homo sapiens
acagaagtgctagaagccagtgctcgtgaactaaggagaaaaagaacagacaagggaacagcctggacatggcatcagagatccacatgacaggcccaatgtgcctcattgagaacactaatgggcgactgatggcgaatccagaagctctgaagatcctttctgccattacacagcctatggtggtggtggcaattgtgggcctctaccgcacaggcaaatcctacctgatgaacaagctggctggaaagaaaaagggcttctctctgggctccacggtgcagtctcacactaaaggaatctggatgtggtgtgtgccccaccccaagaagccaggccacatcctagttctgctggacaccgagggtctgggagatgtagagaagggtgacaaccagaatgactcctggatcttcgccctggccgtcctcctgagcagcaccttcgtgtacaatagcataggaaccatcaaccagcaggctatggaccaactgtactatgtgacagagctgacacatagaatccgatcaaaatcctcacctgatgagaatgagaatgaggttgaggattcagctgactttgtgagcttcttcccagactttgtgtggacactgagagatttctccctggacttggaagcagatggacaacccctcacaccagatgagtacctgacatactccctgaagctgaagaaaggtaccagtcaaaaagatgaaacttttaacctgcccagactctgtatccggaaattcttcccaaagaaaaaatgctttgtctttgatcggcccgttcaccgcaggaagcttgcccagctcgagaaactacaagatgaagagctggaccccgaatttgtgcaacaagtagcagacttctgttcctacatctttagtaattccaaaactaaaactctttcaggaggcatccaggtcaacgggcctcgtctagagagcctggtgctgacctacgtcaatgccatcagcagtggggatctgccgtgcatggagaacgcagtcctggccttggcccagatagagaactcagctgcagtgcaaaaggctattgcccactatgaacagcagatgggccagaaggtgcagctgcccacagaaagcctccaggagctgctggacctgcacagggacagtgagagagaggccattgaagtcttcatcaggagttccttcaaagatgtggaccatctatttcaaaaggagttagcggcccagctagaaaaaaagcgggatgacttttgtaaacagaatcaggaagcatcatcagatcgttgctcaggtttacttcaggtcattttcagtcctctagaagaagaagtgaaggcgggaatttattcgaaaccagggggctatcgtctctttgttcagaagctacaagacctgaagaaaaagtactatgaggaaccgaggaaggggatacaggctgaagagattctgcagacatacttgaaatccaaggagtctatgactgatgcaattctccagacagaccagactctcacagaaaaagaaaaggagattgaagtggaacgtgtgaaagctgagtctgcacaggcttcagcaaaaatgttgcaggaaatgcaaagaaagaatgagcagatgatggaacagaaggagaggagttatcaggaacacttgaaacaactgactgagaagatggagaacgacagggtccagttgctgaaagagcaagagaggaccctcgctcttaaacttcaggaacaggagcaactactaaaagagggatttcaaaaagaaagcagaataatgaaaaatgagatacaggatctccagacgaaaatgagacgacgaaaggcatgtaccataagctaaagaccagagccttcctgtcacccctaaccaaggcataattgaaacaattttagaatttggaacaagcgtcactacatttgataataattagatcttgcatcataacaccaaaagtttataaaggcatgtggtacaatgatcaaaatcatgttttttcttaaaaaaaaaaaaaagactgtaaattgtgcaacaaagatgcatttacctctgtatcaactcaggaaatctcataagctggtaccactcaggagaagtttattcttccagatgaccagcagtagacaaatggatactgagcagagtcttaggtaaaagtcttgggaaatatttgggcattggtctggccaagtctacaatgtcccaatatcaaggacaaccaccctagcttcttagtgaagacaatgtacagttatccattagatcaagactacacggtctatgagcaataatgtgatttctggacattgcccatgtataatcctcactgatgatttcaagctaaagcaaaccaccttatacagagatctagaatctctttatgttctccagaggaaggtggaagaaaccatgggcaggagtaggaattgagtgataaacaattgggctaatgaagaaaacttctcttattgttcagttcatccagattataacttcaatgggacactttagaccattagacaattgacactggattaaacaaattcacataatgccaaatacacaatgtatttatagcaacgtataatttgcaaagatggactttaaaagatgctgtgtaactaaactgaaataattcaattacttattatttagaatgttaaagcttatgatagtcttttctaattcttaacactcatacttgaaatctttccgagtttccccagaagagaatatgggattttttttgacatttttgacccatttaataatgctcttgtgtttacctagtatatgtagactttgtcttatgtgtcaaaagtcctaggaaagtggttgatgtttcttatagcaattaaaaattatttttgaactga

SEQ ID NO: 474 - DNA, 2790 bp, Homo sapiens
ctctgggtaccaactctattgcgcagctcgctgccgtgcgtttaacccaggcgaggaggaggaggagaaaattcccccagattcgggcagacacctccggcccacacagccgttcaccccccgtcttttcagtcctggaaaaggaattcgggctttcattgtctaacgtcgacagtctatatttctgctcttcagtctgtccttaggatgaagctctaactgaactgaagtaaggagaaacagccttgaatctttggagggtctgtcttccttttgggctctgtgcaactgcagctacagtggaaaaaagcaaactgctcttgatcccaggccctgcctaagcctcagcagaacttgtaagcctaaactgaagagcctcacccggacgagcaggcatcccttaaccttaagcaatccagttccacgccctggatcagtgaataaccccagctgcaccatgagccgcgttcgggatgctggctgtgtagcggcggggatagtgataggggctggtgcctggtactgtgtctacaaatacaccagggggagagaccagaccaagaagagaatggccaagcccaaaaaccgggctgtggctgggactggagccagggctagagctgggctaagagccggattcacaatcgaccttgggtcaggattcagtcccccaaccccagtccgtgctgaagcagaggacagggcccaggatgaagcctctgctctggacacagttggagctgaggcagtggccccagctgcatccagcgctgaggctcagagtggggcaggcagtcaggcccaagaggcagatggagccggggttgggcctaaggccgaatcagtagttggggctgcaatggcttctgcaatagcaccacctcccggggtgacagaggcccttggggctgcagaagcccctgcaatggcaggggctcccaaagtggcagaagctcccagagaagcggagacttccagggcagcggtgcctcctgggacagtggtgcctaccgaagcggcagcacccactgaggtgaccgagggtcctggggtagcagcacctaccaaggtagctgaagctcccggggtggcatcgcctaccgaggcagctgaggctcctgtgcccgcaacgcctactggggctgcagcacctactggggctgcagagtctcctggaacttctggttcccctagaacagcggtggttcctggaacatcagctgccaagaaagcaacccctggggctcacactggggctataccgaaagccacatcagcgactggagcggtacccaaaggtggaggcaagggtgtaaccaggtcccggaatgggggcaagggcaagggcaagaaaagcaaagttgaagtagacgaactggggatgggcttccgtcctggagatggggctgcagcagctgctgcagcctctgctaatggcggacaggctttcctggcagaggtccctgattctgaggaaggggagtccgggtggactgacacagagtcagattcagactctgagcccgagacccagcgcagagggaggggaagaagacccgttgccatgcagaagcgcccctttccttatgaaattgatgagattctgggtgtccgcgatctcaggaaggtccttgccttgcttcagaaatctgatgatcctttcatccaacaggtagctttgctcactctgagcaacaatgccaattattcatgcaatcaagagacaatccgcaaattgggaggcctcccaattattgcaaacatgatcaacaaaactgatccacacattaaggaaaaagccttaatggccatgaataacctgagtgagaattatgaaaatcagggccggcttcaggtgtacatgaataaagtgatggatgatatcatggcctctaacctgaactcagcagttcaagtagttggactaaaatttctaacaaacatgactattactaatgactaccagcacctgcttgtcaattccattgcaaactttttccgtttgctatctcagggaggtggaaaaatcaaggttgagattttgaaaatcctttcgaattttgctgaaaatccagatatgttgaagaaacttctcagtacccaagtgccagcatcatttagttccctctataattcttacgtggaatcagaaatccttattaatgcccttactctatttgagattatctatgacaatctcagagcagaagtgtttaactatagagaattcaataaaggttcccttttttacttatgcactacatctggagtgtgtgttaagaaaattagagccttagcaaatcaccatgacctcttagtgaaagtgaaagttataaaactagtgaacaaattctgattggttatgtaccgtcaaaagacttgaagaaatttcatgattttgcagtgtggaagcgttgaaaattgaaagttactgcttttccacttgctcatatagtaaagggatcctttcagctgccagtgttgaataatgtatcatccagagtgatgttatctgtgacagtcaccagctttaagctgaaccattttatgaataccaaataaatagacctcttgtactgaaaacatatttgtgactttaatcgtgctgcttggatagaaatatttttactggttcttctgaattgacagtaaacctgtccattatgaatggcctactgttctattatttgttttgacttgaatttatccaccaaagacttcatttgtgtatcatcaataaagttgtatgtttcaactgacaaaaaaaaaaaaaaaaaaaaaaaaaaaaaa

SEQ ID NO: 475 - DNA, 1504 bp, Homo sapiens
aatagccccggatatctgtgttaccagccttgtctcggccacctcaaggataatcactaaattctgccgaaaggactgaggaacggtgcctggaaaagggcaagaatatcacggcatgggcatgagtagcttgaaactgctgaagtatgtcctgtttttcttcaacttgctcttttggatctgtggctgctgcattttgggctttgggatctacctgctgatccacaacaacttcggagtgctcttccataacctcccctccctcacgctgggcaatgtgtttgtcatcgtgggctctattatcatggtagttgccttcctgggctgcatgggctctatcaaggaaaacaagtgtctgcttatgtcgttcttcatcctgctgctgattatcctccttgctgaggtgaccttggccatcctgctctttgtatatgaacagaagctgaatgagtatgtggctaagggtctgaccgacagcatccaccgttaccactcagacaatagcaccaaggcagcgtgggactccatccagtcatttctgcagtgttgtggtataaatggcacgagtgattggaccagtggcccaccagcatcttgcccctcagatcgaaaagtggagggttgctatgcgaaagcaagactgtggtttcattccaatttcctgtatatcggaatcatcaccatctgtgtatgtgtgattgaggtgttggggatgtcctttgcactgaccctgaactgccagattgacaaaaccagccagaccatagggctatgatctgcagtagttctgtggtgaagagacttgtttcatctccggaaatgcaaaaccatttatagcatgaagccctacatgatcactgcaggatgatcctcctcccatcctttccctttttaggtccctgtcttatacaaccagagaagtgggtgttggccaggcacatcccatctcaggcagcaagacaatctttcactcactgacggcagcagccatgtctctcaaagtggtgaaactaatatctgagcatcttttagacaagagaggcaaagacaaactggatttaatggcccaacatcaaagggtgaacccaggatatgaatttttgcatcttcccattgtcgaattagtctccagcctctaaataatgcccagtcttctccccaaagtcaagcaagagactagttgaagggagttctggggccaggctcactggaccattgtcacaaccctctgtttctctttgactaagtgccctggctacaggaattacacagttctctttctccaaagggcaagatctcatttcaatttctttattagagggccttattgatgtgttctaagtctttccagaaaaaaactatccagtgatttatatcctgatttcaaccagtcacttagctgataatcacagtaagaagacttctggtattatctctctatcagataagattttgttaatgtactattttactcttcaataaataaaacagtttattatctcaa

SEQ ID NO: 476 - DNA, 3119 bp, Homo sapiens
cgcggtatctgcatcgggcctcactggcttcaggagctgaataccctcccaggcacacacaggtgggacacaaataagggttttggaaccactattttctcatcacgacagcaacttaaaatgcctgggaagatggtcgtgatccttggagcctcaaatatactttggataatgtttgcagcttctcaagcttttaaaatcgagaccaccccagaatctagatatcttgctcagattggtgactccgtctcattgacttgcagcaccacaggctgtgagtccccatttttctcttggagaacccagatagatagtccactgaatgggaaggtgacgaatgaggggaccacatctacgctgacaatgaatcctgttagttttgggaacgaacactcttacctgtgcacagcaacttgtgaatctaggaaattggaaaaaggaatccaggtggagatctactcttttcctaaggatccagagattcatttgagtggccctctggaggctgggaagccgatcacagtcaagtgttcagttgctgatgtatacccatttgacaggctggagatagacttactgaaaggagatcatctcatgaagagtcaggaatttctggaggatgcagacaggaagtccctggaaaccaagagtttggaagtaacctttactcctgtcattgaggatattggaaaagttcttgtttgccgagctaaattacacattgatgaaatggattctgtgcccacagtaaggcaggctgtaaaagaattgcaagtctacatatcacccaagaatacagttatttctgtgaatccatccacaaagctgcaagaaggtggctctgtgaccatgacctgttccagcgagggtctaccagctccagagattttctggagtaagaaattagataatgggaatctacagcacctttctggaaatgcaactctcaccttaattgctatgaggatggaagattctggaatttatgtgtgtgaaggagttaatttgattgggaaaaacagaaaagaggtggaattaattgttcaagagaaaccatttactgttgagatctcccctggaccccggattgctgctcagattggagactcagtcatgttgacatgtagtgtcatgggctgtgaatccccatctttctcctggagaacccagatagacagccctctgagcgggaaggtgaggagtgaggggaccaattccacgctgaccctgagccctgtgagttttgagaacgaacactcttatctgtgcacagtgacttgtggacataagaaactggaaaagggaatccaggtggagctctactcattccctagagatccagaaatcgagatgagtggtggcctcgtgaatgggagctctgtcactgtaagctgcaaggttcctagcgtgtacccccttgaccggctggagattgaattacttaagggggagactattctggagaatatagagtttttggaggatacggatatgaaatctctagagaacaaaagtttggaaatgaccttcatccctaccattgaagatactggaaaagctcttgtttgtcaggctaagttacatattgatgacatggaattcgaacccaaacaaaggcagagtacgcaaacactttatgtcaatgttgcccccagagatacaaccgtcttggtcagcccttcctccatcctggaggaaggcagttctgtgaatatgacatgcttgagccagggctttcctgctccgaaaatcctgtggagcaggcagctccctaacggggagctacagcctctttctgagaatgcaactctcaccttaatttctacaaaaatggaagattctggggtttatttatgtgaaggaattaaccaggctggaagaagcagaaaggaagtggaattaattatccaagttactccaaaagacataaaacttacagcttttccttctgagagtgtcaaagaaggagacactgtcatcatctcttgtacatgtggaaatgttccagaaacatggataatcctgaagaaaaaagcggagacaggagacacagtactaaaatctatagatggcgcctataccatccgaaaggcccagttgaaggatgcgggagtatatgaatgtgaatctaaaaacaaagttggctcacaattaagaagtttaacacttgatgttcaaggaagagaaaacaacaaagactatttttctcctgagcttctcgtgctctattttgcatcctccttaataatacctgccattggaatgataatttactttgcaagaaaagccaacatgaaggggtcatatagtcttgtagaagcacagaaatcaaaagtgtagctaatgcttgatatgttcaactggagacactatttatctgtgcaaatccttgatactgctcatcattccttgagaaaaacaatgagctgagaggcagacttccctgaatgtattgaacttggaaagaaatgcccatctatgtcccttgctgtgagcaagaagtcaaagtaaaacttgctgcctgaagaacagtaactgccatcaagatgagagaactggaggagttccttgatctgtatatacaataacataatttgtacatatgtaaaataaaattatgccatagcaagattgcttaaaatagcaacactctatatttagattgttaaaataactagtgttgcttggactattataatttaatgcatgttaggaaaatttcacattaatatttgctgacagctgacctttgtcatctttcttctattttattccctttcacaaaattttattcctatatagtttattgacaataatttcaggttttgtaaagatgccgggttttatatttttatagacaaataataagcaaagggagcactgggttgactttcaggtactaaatacctcaacctatggtataatggttgactgggtttctctgtatagtactggcatggtacggagatgtttcacgaagtttgttcatcagactcctgtgcaactttcccaatgtggcctaaaaatgcaacttctttttattttcttttgtaaatgtttaggtttttttgtatagtaaagtgataatttctggaattagaaaaaaaaaaaaaaaaaaa

SEQ ID NO: 477 - DNA, 2796 bp, Homo sapiens
cctcccctggggaggctcgcgttcccgctgctcgcgcctgccgcccgccggcctcaggaacgcgccctctcgccgcgcgcgccctcgcagtcaccgccacccaccagctccggcaccaacagcagcgccgctgccaccgcccaccttctgccgccgccaccacagccaccttctcctcctccgctgtcctctcccgtcctcgcctctgtcgactatcaggtgaactttgaaccaggatggctgagccccgccaggagttcgaagtgatggaagatcacgctgggacgtacgggttgggggacaggaaagatcaggggggctacaccatgcaccaagaccaagagggtgacacggacgctggcctgaaagaatctcccctgcagacccccactgaggacggatctgaggaaccgggctctgaaacctctgatgctaagagcactccaacagcggaagatgtgacagcacccttagtggatgagggagctcccggcaagcaggctgccgcgcagccccacacggagatcccagaaggaaccacagctgaagaagcaggcattggagacacccccagcctggaagacgaagctgctggtcacgtgacccaagctcgcatggtcagtaaaagcaaagacgggactggaagcgatgacaaaaaagccaagggggctgatggtaaaacgaagatcgccacaccgcggggagcagcccctccaggccagaagggccaggccaacgccaccaggattccagcaaaaaccccgcccgctccaaagacaccacccagctctggtgaacctccaaaatcaggggatcgcagcggctacagcagccccggctccccaggcactcccggcagccgctcccgcaccccgtcccttccaaccccacccacccgggagcccaagaaggtggcagtggtccgtactccacccaagtcgccgtcttccgccaagagccgcctgcagacagcccccgtgcccatgccagacctgaagaatgtcaagtccaagatcggctccactgagaacctgaagcaccagccgggaggcgggaaggtgcagataattaataagaagctggatcttagcaacgtccagtccaagtgtggctcaaaggataatatcaaacacgtcccgggaggcggcagtgtgcaaatagtctacaaaccagttgacctgagcaaggtgacctccaagtgtggctcattaggcaacatccatcataaaccaggaggtggccaggtggaagtaaaatctgagaagcttgacttcaaggacagagtccagtcgaagattgggtccctggacaatatcacccacgtccctggcggaggaaataaaaagattgaaacccacaagctgaccttccgcgagaacgccaaagccaagacagaccacggggcggagatcgtgtacaagtcgccagtggtgtctggggacacgtctccacggcatctcagcaatgtctcctccaccggcagcatcgacatggtagactcgccccagctcgccacgctagctgacgaggtgtctgcctccctggccaagcagggtttgtgatcaggcccctggggcggtcaataattgtggagaggagagaatgagagagtgtggaaaaaaaaagaataatgacccggcccccgccctctgcccccagctgctcctcgcagttcggttaattggttaatcacttaacctgcttttgtcactcggctttggctcgggacttcaaaatcagtgatgggagtaagagcaaatttcatctttccaaattgatgggtgggctagtaataaaatatttaaaaaaaaacattcaaaaacatggccacatccaacatttcctcaggcaattccttttgattcttttttcttccccctccatgtagaagagggagaaggagaggctctgaaagctgcttctgggggatttcaagggactgggggtgccaaccacctctggccctgttgtgggggttgtcacagaggcagtggcagcaacaaaggatttgaaaactttggtgtgttcgtggagccacaggcagacgatgtcaaccttgtgtgagtgtgacgggggttggggtggggcgggaggccacgggggaggccgaggcaggggctgggcagaggggaggaggaagcacaagaagtgggagtgggagaggaagccacgtgctggagagtagacatccccctccttgccgctgggagagccaaggcctatgccacctgcagcgtctgagcggccgcctgtccttggtggccgggggtgggggcctgctgtgggtcagtgtgccaccctctgcagggcagcctgtgggagaagggacagcgggttaaaaagagaaggcaagcctggcaggagggttggcacttcgatgatgacctccttagaaagactgaccttgatgtcttgagagcgctggcctcttcctccctccctgcagggtagggcgcctgagcctaggcggttccctctgctccacagaaaccctgttttattgagttctgaaggttggaactgctgccatgattttggccactttgcagacctgggactttagggctaaccagttctctttgtaaggacttgtgcctcttgggagacgtccacccgtttccaagcctgggccactggcatctctggagtgtgtgggggtctgggaggcaggtcccgagccccctgtccttcccacggccactgcagtcaccccgtctgcgccgctgtgctgttgtctgccgtgagagcccaatcactgcctatacccctcatcacacgtcacaatgtcccgaattc

SEQ ID NO: 478 - DNA, 2984 bp, Homo sapiens
taactgagcgaggagcaattgattaatagctcggcgaggggactcactgactgttataataacactacaccagcaactcctggcttcccagcagccggaacacagacaggagagagtcagtggcaaatagacatttttcttatttcttaaaaaacagcaacttgtttgctacttttatttctgttgatttttttttcttggtgtgtgtggtggttgtttttaagtgtggagggcaaaaggagataccatcccaggctcagtccaacccctctccaaaacggcttttctgacactccaggtagcgagggagttgggtctccaggttgtgcgaggagcaaatgatgaccgccaaggccgtagacaaaatcccagtaactctcagtggttttgtgcaccagctgtctgacaacatctacccggtggaggacctcgccgccacgtcggtgaccatctttcccaatgccgaactgggaggcccctttgaccagatgaacggagtggccggagatggcatgatcaacattgacatgactggagagaagaggtcgttggatctcccatatcccagcagctttgctcccgtctctgcacctagaaaccagaccttcacttacatgggcaagttctccattgaccctcagtaccctggtgccagctgctacccagaaggcataatcaatattgtgagtgcaggcatcttgcaaggggtcacttccccagcttcaaccacagcctcatccagcgtcacctctgcctcccccaacccactggccacaggacccctgggtgtgtgcaccatgtcccagacccagcctgacctggaccacctgtactctccgccaccgcctcctcctccttattctggctgtgcaggagacctctaccaggacccttctgcgttcctgtcagcagccaccacctccacctcttcctctctggcctacccaccacctccttcctatccatcccccaagccagccacggacccaggtctcttcccaatgatcccagactatcctggattctttccatctcagtgccagagagacctacatggtacagctggcccagaccgtaagccctttccctgcccactggacaccctgcgggtgccccctccactcactccactctctacaatccgtaactttaccctggggggccccagtgctggggtgaccggaccaggggccagtggaggcagcgagggaccccggctgcctggtagcagctcagcagcagcagcagccgccgccgccgccgcctataacccacaccacctgccactgcggcccattctgaggcctcgcaagtaccccaacagacccagcaagacgccggtgcacgagaggccctacccgtgcccagcagaaggctgcgaccggcggttctcccgctctgacgagctgacacggcacatccgaatccacactgggcataagcccttccagtgtcggatctgcatgcgcaacttcagccgcagtgaccacctcaccacccatatccgcacccacaccggtgagaagcccttcgcctgtgactactgtggccgaaagtttgcccggagtgatgagaggaagcgccacaccaagatccacctgagacagaaagagcggaaaagcagtgccccctctgcatcggtgccagccccctctacagcctcctgctctgggggcgtgcagcctgggggtaccctgtgcagcagtaacagcagcagtcttggcggagggccgctcgccccttgctcctctcggacccggacaccttgagatgagactcaggctgatacaccagctcccaaaggtcccggaggccctttgtccactggagctgcacaacaaacactaccaccctttcctgtccctctctccctttgttgggcaaagggctttggtggagctagcactgccccctttccacctagaagcaggttcttcctaaaacttagcccattctagtctctcttaggtgagttgactatcaacccaaggcaaaggggaggctcagaaggaggtggtgtggggatcccctggccaagagggctgaggtctgaccctgctttaaagggttgtttgactaggttttgctaccccacttccccttattttgacccatcacaggtttttgaccctggatgtcagagttgatctaagacgttttctacaataggttgggagatgctgatcccttcaagtggggacagcaaaaagacaagcaaaactgatgtgcactttatggcttgggactgatttgggggacattgtacagtgagtgaagtatagcctttatgccacactctgtggccctaaaatggtgaatcagagcatatctagttgtctcaacccttgaagcaatatgtattatatactcagagaacagaagtgcaatgtgatgggaggaacgtagcaatatctgctccttttcgagttgtttgagaaatgtaggctattttttcagtgtatatccactcagattttgtgtatttttgatgtacccacactgttctctaaattctgaatctttgggaaaaaatgtaaagcatttatgatctcagaggttaacttatttaagggggatgtacatattctctgaaactaggatgcatgcaattgtgttggaagtgtccttggtcgccttgtgtgatgtagacaaatgttacaaggctgcatgtaaatgggttgccttattatggagaaaaaaatcactccctgagtttagtatggctgtatatttatgcctattaatatttggaattttttttagaaagtatatttttgtatgctttgttttgtgacttaaaagtgttacctttgtagtcaaatttcagataagaatgtacataatgttaccggagctgatttgtttggtcattagctcttaatagttgtgaaaaaataaatctattctaacgcaaaaccactaactgaagttcagatataatggatggtttgtgactatagtgtaaataaatacttttcaacaat

SEQ ID NO: 479 - DNA, 1712 bp, Homo sapiens
aaggtcaatgatagcatctgcctagagtcaaacctccgtgcttctcagacagtgccttttcaccatgagtgggtgcccatttttaggaaacaactttggatatacttttaaaaaactccccgtagaaggcagcgaagaagacaaatcacaaactggtgtgaatagagccagcaaaggaggtcttatctatgggaactacctgcatttggaaaaagttttgaatgcacaagaactgcaaagtgaaacaaaaggaaataaaatccatgatgaacatctttttatcataactcatcaagcttatgaactctggtttaagcaaatcctctgggagttggattctgttcgagagatctttcagaatggccatgtcagagatgaaaggaacatgcttaaggttgtttctcggatgcaccgagtgtcagtgatcctgaaactgctggtgcagcagttttccattctggagacgatgacagccttggacttcaatgacttcagagagtacttatctccagcatcaggcttccagagtttgcaattccgactattagaaaacaagataggtgttcttcagaacatgagagtcccttataacagaagacattatcgtgataacttcaaaggagaagaaaatgaactgctacttaaatctgagcaggaaaagacacttctggaattagtggaggcatggctggaaagaactccaggtttagagccacatggatttaacttctggggaaagcttgaaaaaaatatcaccagaggcctggaagaggaattcataaggattcaggctaaagaagagtctgaagaaaaagaggaacaggtggctgaatttcagaagcaaaaagaggtgctactgtccttatttgatgagaaacgtcatgaacatctccttagtaaaggtgaaagacggctgtcatacagagcacttcagggagcattgatgatatatttttacagggaagagcctaggttccaggtgccttttcagttgctgacttctcttatggacatagattcactgatgaccaaatggagatataaccatgtgtgcatggtgcacagaatgctgggcagcaaagctggcaccggtggttcctcaggctatcactacctgcgatcaactgtgagtgataggtacaaggtatttgtagatttatttaatctttcaacatacctgattccccgacactggataccgaagatgaacccaaccattcacaaatttctatatacagcagaatactgtgatagctcctacttcagcagtgatgaatcagattaaaatcgtctgcaaaatctatgaagaatactggtttcacagcctattttttattttctatggattttcataaatacagtttgaatatatgtatgcatatattgttcagcaccacgatgctctgatttaattctagaaacaatttgattacctcttgtttgtgacaagactaagcattaagatgagaaagaatacatttaaatagtaacattgtacatagggtgttttcctattaaaaatcagtttcccctgagacttaatgtaaccacttaatgtaatcactatctcattgtttcatctttataaacttgtaaacttcatctatttcaaatattttatgcagtacattatattattctgtacaaaggctttcaaacaaaatttttaaaataataaagtattaatctttcaaaaaaaaaaaaaaaaaaaa

SEQ ID NO: 480 - DNA, 2175 bp, Homo sapiens
gagaaattggagaagataaaactggacactggggagaccacaacttcatgctgcgtgggatctcccagctacctgcagtggccaccatgtcttgggtcctgctgcctgtactttggctcattgttcaaactcaagcaatagccataaagcaaacacctgaattaacgctccatgaaatagtttgtcctaaaaaacttcacattttacacaaaagagagatcaagaacaaccagacagaaaagcatggcaaagaggaaaggtatgaacctgaagttcaatatcagatgatcttaaatggagaagaaatcattctctccctacaaaaaaccaagcacctcctggggccagactacactgaaacattgtactcacccagaggagaggaaattaccacgaaacctgagaacatggaacactgttactataaaggaaacatcctaaatgaaaagaattctgttgccagcatcagtacttgtgacgggttgagaggatacttcacacatcatcaccaaagataccagataaaacctctgaaaagcacagacgagaaagaacatgccgtctttacatctaaccaggaggaacaagacccagctaaccacacatgtggtgtgaagagcactgacgggaaacaaggcccaattcgaatctctagatcactcaaaagcccagagaaagaagactttcttcgggcacagaaatacattgatctctatttggtgctggataatgccttttataagaactataatgagaatctaactctgataagaagctttgtgtttgatgtgatgaacctactcaatgtgatatataacaccatagatgttcaagtggccttggtaggtatggaaatctggtctgatggggataagataaaggtggtgcccagcgcaagcaccacgtttgacaacttcctgagatggcacagttctaacctggggaaaaagatccacgaccatgctcagcttctcagcgggattagcttcaacaatcgacgtgtgggactggcagcttcaaattccttgtgttccccatcttcggttgctgttattgaggctaaaaaaaagaataatgtggctcttgtaggagtgatgtcacatgagctgggccatgtccttggtatgcctgatgttccattcaacaccaagtgtccctctggcagttgtgtgatgaatcagtatctgagttcaaaattcccaaaggatttcagtacatcttgccgtgcacattttgaaagataccttttatctcagaaaccaaagtgcctgctgcaagcacctattcctacaaatataatgacaacaccagtgtgtgggaaccaccttctagaagtgggagaagactgtgattgtggctctcctaaggagtgtaccaatctctgctgtgaagccctaacgtgtaaactgaagcctggaactgattgcggaggagatgctccaaaccataccacagagtgaatccaaaagtctgcttcactgagatgctaccttgccaggacaagaaccaagaactctaactgtcccaggaatcttgtgaattttcacccataatggtctttcacttgtcattctactttctatattgttatcagtccaggaaacaggtaaacagatgtaattagagacattggctctttgtttaggcctaatctttctttttacttttttttttcttttttctttttttttaaagatcatgaatttgtgacttagttctgccctttggagaacaaaagaaagcagtcttccatcaaatcaccttaaaatgcacggctaaactattcagagttaacactccagaattgttaaattacaagtactatgctttaatgcttctttcatcttactagtatggcctataaaaaaaataataccacttgatgggtgaaggctttggcaatagaaagaagaatagaattcaggttttatgttattcctctgtgttcacttcgccttgctcttgaaagtgcagtatttttctacatcatgtcgagaatgattcaatgtaaatatttttcattttatcatgtatatcctatacacacatctccttcatcatcatatatgaagtttattttgagaagtctacattgcttacattttaattgagccagcaaagaaggcttaatgatttattgaaccataatgtcaataaaaacacaacttttgaggc

SEQ ID NO: 481 - DNA, 1805 bp, Homo sapiens
tgtttactttggttgtcccttctggcatggtgcatatgttatgggaagagggattataatttggtgctgtttgtagagatgacaacactgataaaatccactcattgctggtcccagcacacctggaaagttctgcaaggcctcagctacagaaagcccagagacagaaagtaaactctttcatgacccttgatcatcagatcatcaatccaactcttaaatggtcacaacctgcagtgccaagtggtgggcctcttgtgcagcatgcacacacaactctggacagtgatgctggcctcacagaaaacccactcaccaagttactagctattgggaaagaagatgacaatgcacaatggcatatggaggacgttattgaggatataatcggtatggaatcaagttttaaagaggaaggagcagactctcctctgctaatgcaaagaacattatctggaagtattttggatgtgtatagcggtgaacaaggaatttcaccaattaacatggggcttacaagtgcttcttgtccaagtagtctaccaatgaaaagagaaattacagaaactgacactagagctttagcaaaagagagacaaaaaaaggacaaccacaacctcattgaaagaagaagaaggtataatattaattaccgaatcaaggagcttggcactcttattccaaagtctaatgatcctgatatgcgctggaacaaaggaaccattctaaaagcatcagtggagtacatcaagtggctacaaaaagaacaacagagagcccgagaattggaacacagacagaagaaattagagcaggctaacaggcgacttctacttcggattcaggaactagaaattcaggctcgtactcatggtctgccaaccctggcttcacttggcacggttgatttaggtgctcatgtcaccaaacagcagagccatcctgagcagaattcagtagactattgccaacaactgactgtgtctcaggggccaagccctgagctctgtgatcaagctatagccttttctgatcctttgtcatacttcacagatttatcatttagtgctgcattgaaagaggaacaaagattggatggcatgctattggatgacacaatctctccatttggaacagatcctctgctatctgccacttcccctgcagtttccaaagaaagcagtaggagaagtagctttagctcagatgatggtgatgaattataagaaataaacagacccaattcatcaactggaaagcaattctatgctggtgctatgcaattatgctctgtgtttcatatgttgctttggcttattttttttcttaaaggaatgtgttgttcatgaaaaactgatagaagcaacagaagaattcgcaggaagaaaaatcatagtgttaatgaattattgagggcgaaaaaaaggtgttttcttctttgactacggagtccaaatccacttaaattctgttttcctgaaaagaggtacagcataagaaatagctctttattgatgttttaaaagcagcaacttggtggtgtactactggaactaatgactgcaaagtgttaaacgactgaaatatacaaacagtctcttagttactcatttccatcttctcttcaactttcacatcagtcttccggaatcaagatcaacatatcaggtggtcattgcctttctccattgtctagtagacatgtctaaagttcaaactttataggataaataaatgtataatagattatctgtcacttgtggttgaaaggcaaatctacaataaatgtgagaattttccacaat

SEQ ID NO: 482 - DNA, 895 bp, Homo sapiens
gccatcttgcgtccccgcgtgtgtgcgcctaatctcaggtggtccacccgagaccccttgagcaccaaccctagtcccccgcgcggccccttattcgctccgacaagatgaaagaaacaatcatgaaccaggaaaaactcgccaaactgcaggcacaagtgcgcattggtgggaaaggaactgctcgcagaaagaagaaggtggttcatagaacagccacagcagatgacaaaaaacttcagttctccttaaagaagttaggggtaaacaatatctctggtattgaagaggtgaatatgtttacaaaccaaggaacagtgatccactttaacaaccctaaagttcaggcatctctggcagcgaacactttcaccattacaggccatgctgagacaaagcagctgacagaaatgctacccagcatcttaaaccagcttggtgcggatagtctgactagtttaaggagactggccgaagctctgcccaaacaatctgtggatggaaaagcaccacttgctactggagaggatgatgatgatgaagttccagatcttgtggagaattttgatgaggcttccaagaatgaggcaaactgaattgagtcaacttctgaagataaaacctgaagaagttactgggagctgctattttatattatgactgctttttaagaaatttttgtttatggatctgataaaatctagatctctaatatttttaagcccaagccccttggacactgcagctcttttcagtttttgcttatacacaattcattctttgcagctaattaagccgaagaagcctgggaatcaagtttgaaacaaagattaataaagttctttgcctagtaaaaaaaaaaaaaaaaaaaaaaataaaaaaaaaaaaaaaaaaa

SEQ ID NO: 483 - DNA, 9432 bp, Homo sapiens
gccgtggctccggtagcagcaagttcgaaccccgctcccgctccgcttcggttctcgctccttcggcccttgggcctccaaacaccagtccccggcagctcgttgcgcattgcgctctccccgccaccaggatgccggtaaccgagaaggatctagctgaggacgcgccttggaagaagatccagcagaacacgttcacacgctggtgcaacgagcacctcaagtgcgtgaacaaacgcatcggcaacctgcagaccgacctgagcgacgggctgcggctcatcgcgctgctcgaggtgctcagccagaagcgcatgtaccgcaagtaccatcagcggcccacctttcgccagatgcagctcgagaatgtgtccgtggcgctcgagttcctggaccgtgagagcatcaagctcgtgtccatcgatagcaaagccattgtggatgggaacctgaagctcatcttgggtctggtgtggacgctgatcctccactactccatctccatgcccgtgtgggaggatgaaggggatgatgatgccaagaagcagacgccaaagcagaggctgctggggtggattcagaacaagatcccctacttgcccatcaccaactttaaccagaactggcaagacggcaaagccctgggagccctggtagacagctgtgctccaggtctgtgcccagactgggaatcctgggacccgcagaagcctgtggataatgcacgagaagccatgcagcaggcagatgactggctgggtgtcccacaggtcatcactcctgaagaaatcattcacccggatgtggacgagcactcagttatgacttacctgtcccagttccccaaagccaagctcaagccgggggctcctctcaaacccaaactcaacccgaagaaagccagggcctatggcagaggaatcgagcccactggaaacatggtgaagcagccagccaagttcactgtggacaccatcagcgccgggcaaggagacgtgatggtgtttgttgaggacccagaagggaacaaagaggaggcacaagtgacccctgacagcgacaagaacaagacatactctgtggagtatctgcccaaggtcaccgggctacacaaagtcacagtcctctttgcaggacagcacatctccaagagcccatttgaagtgagtgttgacaaggcccagggagatgccagtaaagtcactgcaaaaggtccagggttggaagctgtagggaacatcgccaataagcccacctactttgacatctatacggcaggagctggtgtgggtgacattggtgtggaggtggaagatccccaggggaagaacaccgtggagttgctcgtggaagacaaaggaaaccaggtgtatcgatgtgtgtacaaacccatgcagcctggccctcacgtggtcaagatcttctttgctggggacactattcctaagagtcccttcgttgtgcaggttggggaagcctgcaatccaaatgcctgccgggccagtggccgaggcctacaacccaaaggcgtccgtatccgggagaccacagatttcaaggttgacaccaaagctgcaggaagtggggagctcggggtaaccatgaagggtcctaagggtctggaggagctggtgaagcagaaagactttctggatggggtctacgcattcgagtattaccccagcaccccggggagatacagcattgccatcacatgggggggacaccacattccaaagagcccctttgaagttcaagttggccctgaagcgggtatgcagaaagtccgtgcttggggccctgggctccatggtgggattgtcgggcggtcagcggacttcgtggtagaatccattggctctgaagtggggtctctggggtttgccattgaaggcccctctcaggcaaagattgagtacaacgaccagaatgatggatcgtgtgatgtcaaatactggcccaaggagcctggcgaatatgctgttcacatcatgtgtgacgacgaagacatcaaggacagcccgtacatggccttcatccacccagccacgggaggctacaaccctgatctggttcgagcatacgggccaggtttggagaaatctggatgcattgtcaacaacctggccgagttcactgtggatcctaaggatgctggaaaagctcccttaaagatatttgctcaggatggggaaggccaacgcattgacatccagatgaagaaccggatggacggcacatatgcatgctcatacaccccggtgaaggccatcaagcacaccattgctgtggtctggggaggcgtgaacatcccgcacagcccctacagggtcaacatcgggcaaggtagccatcctcagaaggtcaaagtgtttgggccaggtgtggagagaagtggtctgaaggcaaatgaacctacacacttcacggtggactgtactgaggctggggaaggtgatgtcagtgttggcattaagtgtgatgcccgggtgttaagtgaagatgaggaagacgtggattttgacattattcacaatgccaatgatacgttcacagtcaaatatgtgcctcctgctgctgggcgatacactatcaaagttctctttgcatctcaggaaatccccgccagccctttcagagtcaaagttgacccttcccacgatgccagcaaagtgaaggcagaaggcccagggctcagcaaagcaggtgtggaaaatgggaaaccgacccacttcactgtctacaccaagggggctgggaaagccccgctcaacgtgcagttcaacagccctcttcctggcgatgcagtgaaggatttggatatcatcgataattatgactactctcacacggttaaatatacacccacccaacagggcaacatgcaggttctggtgacttacggtggcgatcccatccctaaaagccctttcactgtgggtgttgctgcaccgctggatctgagcaagataaaactcaatgggctggaaaacagggtggaagttgggaaggatcaggagttcaccgttgataccaggggggcaggaggccaggggaagctggacgtgacaatcctcagcccctctcggaaggtcgtgccatgcctagtgacacctgtgacaggccgggagaacagcacggccaagttcatccctcgggaggaggggctgtatgctgtagacgtgacctacgatggacaccctgtgcccgggagcccctacacagtggaggcctcgctgccaccagatcccagcaaggtgaaggcccacggtcccggcctcgaaggtggtctcgtgggcaagcctgccgagttcaccatcgataccaaaggagctggtactggaggtctgggcttaacggtggaaggtccgtgcgaggccaaaatcgagtgctccgacaatggtgatgggacctgctccgtctcttaccttcccacaaaacccggggagtacttcgtcaacatcctctttgaagaagtccacatacctgggtctcccttcaaagctgacattgaaatgccctttgacccctctaaagtcgtggcatcggggccaggtctcgagcacgggaaggtgggtgaagctggcctccttagcgtcaactgctcggaagcgggaccgggggccctgggcctggaagctgtctcggactcgggaacaaaagccgaagtcagtattcagaacaacaaagatggcacctacgcggtgacctacgtgcccctgacggccggcatgtacacgttgaccatgaagtatggtggcgaactcgtgccacacttccccgcccgggtcaaggtggagcccgccgtggacaccagcaggatcaaagtctttggaccaggaatagaagggaaagatgtgttccgggaagctaccaccgactttacagttgactctcggccgctgacccaggttgggggtgaccacatcaaggcccacattgccaacccctcaggggcctccaccgagtgctttgtcacagacaatgcggatgggacctaccaggtggaatacacaccctttgagaaaggtctccatgtagtggaggtgacatatgatgacgtgcctatcccaaacagtcccttcaaggtggctgtcactgaaggctgccagccatctagggtgcaagcccaaggacctggattgaaagaggcctttaccaacaagcccaatgtcttcaccgtggttaccagaggcgcaggaattggtgggcttggcataactgttgagggaccatcagagtcgaagataaattgcagagacaacaaggatggcagctgcagtgctgagtacattcctttcgcgccgggggattacgatgttaatatcacatatggaggagcccacatccctggcagccccttcagggttcctgtgaaggatgttgtggaccccagcaaggtcaagattgccggccccgggctgggctcaggcgtccgagcccgtgtcctgcagtccttcacggtggacagcagcaaggctggcctggctccgctggaagtgagggttctgggcccacgaggcttggtggagccagtgaacatggtggacaatggagatggcacacacacagtaacctacaccccatctcaggagggaccttacatggtctcagttaaatatgctgatgaagagattcctcgcagtcccttcaaggtcaaggtccttcccacatatgatgccagcaaagtgactgccagtggccccggccttagttcctatggtgtgcctgccagtctacctgtggactttgcaattgatgcccgagatgccggggaaggcctgcttgctgttcaaataacggaccaagaaggaaaacccaaaagagccattgtccatgacaataaagatggcacgtatgctgtcacctacatccccgacaagactgggcgctatatgattggagtcacctacgggggtgacgacatcccactttctccttatcgcatccgagccacacagacgggtgatgccagcaagtgcctggccacgggtcctggaatcgcctccactgtgaaaactggcgaagaagtaggctttgtggttgatgccaagactgccgggaagggtaaagtgacctgcacggttctgaccccagatggcactgaggccgaggccgatgtcattgagaatgaagatggaacctatgacatcttctacacagctgccaagccgggcacatatgtgatctatgtgcgcttcggtggtgttgatattcctaacagccccttcactgtcatggccacagatggggaagtcacagccgtggaggaggcaccggtaaatgcatgtccccctggattcaggccctgggtgaccgaagaggcctatgtcccagtgagtgacatgaacggcctgggatttaagccttttgacctggtcattccgtttgctgtcaggaaaggagaaatcactggagaggtccacatgccttctgggaagacagccacacctgagattgtggacaacaaggacggcacggtcactgttagatatgcccccactgaggtcgggctccatgagatgcacatcaaatacatgggcagccacatccctgagagcccactccagttctacgtgaactaccccaacagtggaagtgtttctgcatacggtccaggcctcgtgtatggagtggccaacaaaactgccaccttcaccatcgtcacagaggatgcaggagaaggtggtctggacttggctattgagggcccctcaaaagcagaaatcagctgcattgacaataaagatgggacatgcacagtgacctacctgccgactctgccaggcgactacagcattctggtcaagtacaatgacaagcacatccctggcagccccttcacagccaagatcacagatgacagcaggcggtgctcccaggtgaagttgggctcagccgctgacttcctgctcgacatcagtgagactgacctcagcagcctgacggccagcattaaggccccatctggccgagacgagccctgtctcctgaagaggctgcccaacaaccacattggcatctccttcatcccccgggaagtgggcgaacatctggtcagcatcaagaaaaatggcaaccatgtggccaacagccccgtgtctatcatggtggtccagtcggagattggtgacgcccgccgagccaaagtctatggccgcggcctgtcagaaggccggactttcgagatgtctgacttcatcgtggacacaagggatgcaggttatggtggcatatccttggcggtggaaggccccagcaaagtggacatccagacggaggacctggaagatggcacctgcaaagtctcctacttccctaccgtgcctggggtttatatcgtctccaccaaattcgctgacgagcacgtgcctgggagcccatttaccgtgaagatcagtggggagggaagagtcaaagagagcatcacccgcaccagtcgggccccgtccgtggccactgtcgggagcatttgtgacctgaacctgaaaatcccagaaatcaacagcagtgatatgtcggcccacgtcaccagcccctctggccgtgtgactgaggcagagattgtgcccatggggaagaactcacactgcgtccggtttgtgccccaggagatgggcgtgcacacggtcagcgtcaagtaccgtgggcagcacgtcaccggcagccccttccagttcaccgtggggccacttggtgaaggaggcgcccacaaggtgcgggcaggaggccctggcctggagagaggagaagcgggagtcccagctgagttcagcatttggacccgggaagcaggcgctggaggcctctccatcgctgttgagggccccagtaaggccgagattacattcgatgaccataaaaatgggtcgtgcggtgtatcttatattgcccaagagcctggtaactacgaggtgtccatcaagttcaatgatgagcacatcccggaaagcccctacctggtgccggtcatcgcaccctccgacgacgcccgccgcctcactgttatgagccttcaggaatcgggattaaaagttaaccagccagcatcctttgctataaggttgaatggcgcaaaaggcaagattgatgcaaaggtgcacagcccctctggagccgtggaggagtgccacgtgtctgagctggagccagataagtatgctgttcgcttcatccctcatgagaatggtgtccacaccatcgatgtcaagttcaatgggagccacgtggttggaagccccttcaaagtgcgcgttggggagcctggacaagcggggaaccctgccctggtgtccgcctatggcacgggactcgaagggggcaccacaggtatccagtcggaattctttattaacaccacccgagcaggtccagggacattatccgtcaccatcgaaggcccatccaaggttaaaatggattgccaggaaacacctgaagggtacaaagtcatgtacacccccatggctcctggtaactacctgatcagtgtcaaatacggtgggcccaaccacatcgtgggcagtcccttcaaggccaaggtgacaggccagcgtctagttagccctggctcagccaacgagacctcatccatcctggtggagtcagtgaccaggtcgtctacagagacctgctatagcgccattcccaaggcatcctcggacgccagcaaggtgacctctaagggggcagggctctcaaaggcctttgtgggccagaagagttccttcctggtggactgcagcaaagctggctccaacatgctgctgatcggggtccatgggcccaccaccccctgcgaggaggtctccatgaagcatgtaggcaaccagcaatacaacgtcacatacgtcgtcaaggagaggggcgattatgtgctggctgtgaagtggggggaggaacacatccctggcagcccttttcatgtcacagtgccttaaaacagttttctcaaatcctggagagagttcttgtggttgcttttgttgcttgtttgtaattcattttatacaaagccctccagcctgtttgtggggctgaaaccccatccctaaaatattgctgttgtaaaatgccttcagaaataagtcctagactggactcttgagggacatattggagaatcttaagaaatgcaagcttgttcagggggctgagaagatcctgagtacactaggtgcaaaccagaactcttggtggaacagaccagccactgcagcagacagaccaggaacacaatgagactgacatttcaaaaaaacaaaactggctagcctgagctgctggttcactcttcagcatttatgaaacaaggctaggggaagatgggcagagaaaaaggggacacctagtttggttgtcatttggcaaaggagatgacttaaaatccgcttaatctcttccagtgtccgtgttaatgtatttggctattagatcactagcactgctttaccgctcctcatcgccaacacccccatgctctgtggccttcttacacttctcagagggcagagtggcagccgggcaccctacagaaactcagagggcagagtggcagccaggcccacatgtctctcaagtacctgtcccctcgctctggtgattatttcttgcagaatcaccacacgagaccatcccggcagtcatggttttgctttagttttccaagtccgtttcagtcccttccttggtctgaagaaattctgcagtggcgagcagtttcccacttgccaaagatcccttttaaccaacactagcccttgtttttaacacacgctccagcccttcatcagcctgggcagtcttaccaaaatgtttaaagtgatctcagaggggcccatggattaacgccctcatcccaaggtccgtcccatgacataacactccacacccgccccagccaacttcatgggtcactttttctggaaaataatgatctgtacagacaggacagaatgaaactcctgcggctctttggcctgaaagttgggaatggttgggggagagaagggcagcagcttattggtggtcttttcaccattggcagaaacagtgagagctgtgtggtgcagaaatccagaaatgaggtgtagggaattttgcctgccttcctgcagacctgagctggctttggaatgaggttaaagtgtcagggacgttgcctgagcccaaatgtgtagtgtggtctgggcaggcagacctttaggttttgctgcttagtcctgaggaagtggccactcttgtggcaggtgtagtatctggggcgagtgttgggggtaaaagcccaccctacagaaagtggaacagcccggacctgatgtgaaaggaccacgggtgttgtaagctgggaccggaaccaaactggaatcaaacgcgactgtaaattgtatcttataacttattaaataaaacattgctccgtaaaaaaaaaaa

SEQ ID NO: 484 - DNA, 5010 bp, Homo sapiens
ggcggctcgggacggaggacgcgctagtgtgagtgcgggcttctagaactacaccgaccctcgtgtcctcccttcatcctgcggggctggctggagcggccgctccggtgctgtccagcagccatagggagccgcacggggagcgggaaagcggtcgcggccccaggcggggcggccgggatggagcggggccgcgagcctgtggggaaggggctgtggcggcgcctcgagcggctgcaggttcttctgtgtggcagttcagaatgatggatcaagctagatcagcattctctaacttgtttggtggagaaccattgtcatatacccggttcagcctggctcggcaagtagatggcgataacagtcatgtggagatgaaacttgctgtagatgaagaagaaaatgctgacaataacacaaaggccaatgtcacaaaaccaaaaaggtgtagtggaagtatctgctatgggactattgctgtgatcgtctttttcttgattggatttatgattggctacttgggctattgtaaaggggtagaaccaaaaactgagtgtgagagactggcaggaaccgagtctccagtgagggaggagccaggagaggacttccctgcagcacgtcgcttatattgggatgacctgaagagaaagttgtcggagaaactggacagcacagacttcaccagcaccatcaagctgctgaatgaaaattcatatgtccctcgtgaggctggatctcaaaaagatgaaaatcttgcgttgtatgttgaaaatcaatttcgtgaatttaaactcagcaaagtctggcgtgatcaacattttgttaagattcaggtcaaagacagcgctcaaaactcggtgatcatagttgataagaacggtagacttgtttacctggtggagaatcctgggggttatgtggcgtatagtaaggctgcaacagttactggtaaactggtccatgctaattttggtactaaaaaagattttgaggatttatacactcctgtgaatggatctatagtgattgtcagagcagggaaaatcacctttgcagaaaaggttgcaaatgctgaaagcttaaatgcaattggtgtgttgatatacatggaccagactaaatttcccattgttaacgcagaactttcattctttggacatgctcatctggggacaggtgacccttacacacctggattcccttccttcaatcacactcagtttccaccatctcggtcatcaggattgcctaatatacctgtccagacaatctccagagctgctgcagaaaagctgtttgggaatatggaaggagactgtccctctgactggaaaacagactctacatgtaggatggtaacctcagaaagcaagaatgtgaagctcactgtgagcaatgtgctgaaagagataaaaattcttaacatctttggagttattaaaggctttgtagaaccagatcactatgttgtagttggggcccagagagatgcatggggccctggagctgcaaaatccggtgtaggcacagctctcctattgaaacttgcccagatgttctcagatatggtcttaaaagatgggtttcagcccagcagaagcattatctttgccagttggagtgctggagactttggatcggttggtgccactgaatggctagagggatacctttcgtccctgcatttaaaggctttcacttatattaatctggataaagcggttcttggtaccagcaacttcaaggtttctgccagcccactgttgtatacgcttattgagaaaacaatgcaaaatgtgaagcatccggttactgggcaatttctatatcaggacagcaactgggccagcaaagttgagaaactcactttagacaatgctgctttccctttccttgcatattctggaatcccagcagtttctttctgtttttgcgaggacacagattatccttatttgggtaccaccatggacacctataaggaactgattgagaggattcctgagttgaacaaagtggcacgagcagctgcagaggtcgctggtcagttcgtgattaaactaacccatgatgttgaattgaacctggactatgagaggtacaacagccaactgctttcatttgtgagggatctgaaccaatacagagcagacataaaggaaatgggcctgagtttacagtggctgtattctgctcgtggagacttcttccgtgctacttccagactaacaacagatttcgggaatgctgagaaaacagacagatttgtcatgaagaaactcaatgatcgtgtcatgagagtggagtatcacttcctctctccctacgtatctccaaaagagtctcctttccgacatgtcttctggggctccggctctcacacgctgccagctttactggagaacttgaaactgcgtaaacaaaataacggtgcttttaatgaaacgctgttcagaaaccagttggctctagctacttggactattcagggagctgcaaatgccctctctggtgacgtttgggacattgacaatgagttttaaatgtgatacccatagcttccatgagaacagcagggtagtctggtttctagacttgtgctgatcgtgctaaattttcagtagggctacaaaacctgatgttaaaattccatcccatcatcttggtactactagatgtctttaggcagcagcttttaatacagggtagataacctgtacttcaagttaaagtgaataaccacttaaaaaatgtccatgatggaatattcccctatctctagaattttaagtgctttgtaatgggaactgcctctttcctgttgttgttaatgaaaatgtcagaaaccagttatgtgaatgatctctctgaatcctaagggctggtctctgctgaaggttgtaagtggttcgcttactttgagtgatcctccaacttcatttgatgctaaataggagataccaggttgaaagacctctccaaatgagatctaagcctttccataaggaatgtagcaggtttcctcattcctgaaagaaacagttaactttcagaagagatgggcttgttttcttgccaatgaggtctgaaatggaggtccttctgctggataaaatgaggttcaactgttgattgcaggaataaggccttaatatgttaacctcagtgtcatttatgaaaagaggggaccagaagccaaagacttagtatattttcttttcctctgtcccttcccccataagcctccatttagttctttgttatttttgtttcttccaaagcacattgaaagagaaccagtttcaggtgtttagttgcagactcagtttgtcagactttaaagaataatatgctgccaaattttggccaaagtgttaatcttaggggagagctttctgtccttttggcactgagatatttattgtttatttatcagtgacagagttcactataaatggtgtttttttaatagaatataattatcggaagcagtgccttccataattatgacagttatactgtcggttttttttaaataaaagcagcatctgctaataaaacccaacagatactggaagttttgcatttatggtcaacacttaagggttttagaaaacagccgtcagccaaatgtaattgaataaagttgaagctaagatttagagatgaattaaatttaattaggggttgctaagaagcgagcactgaccagataagaatgctggttttcctaaatgcagtgaattgtgaccaagttataaatcaatgtcacttaaaggctgtggtagtactcctgcaaaattttatagctcagtttatccaaggtgtaactctaattcccatttgcaaaatttccagtacctttgtcacaatcctaacacattatcgggagcagtgtcttccataatgtataaagaacaaggtagtttttacctaccacagtgtctgtatcggagacagtgatctccatatgttacactaagggtgtaagtaattatcgggaacagtgtttcccataattttcttcatgcaatgacatcttcaaagcttgaagatcgttagtatctaacatgtatcccaactcctataattccctatcttttagttttagttgcagaaacattttgtggtcattaagcattgggtgggtaaattcaaccactgtaaaatgaaattactacaaaatttgaaatttagcttgggtttttgttacctttatggtttctccaggtcctctacttaatgagatagcagcatacatttataatgtttgctattgacaagtcattttaatttatcacattatttgcatgttacctcctataaacttagtgcggacaagttttaatccagaattgaccttttgacttaaagcagagggactttgtatagaaggtttgggggctgtggggaaggagagtcccctgaaggtctgacacgtctgcctacccattcgtggtgatcaattaaatgtaggtatgaataagttcgaagctccgtgagtgaaccatcatataaacgtgtagtacagctgtttgtcatagggcagttggaaacggcctcctagggaaaagttcatagggtctcttcaggttcttagtgtcacttacctagatttacagcctcacttgaatgtgtcactactcacagtctctttaatcttcagttttatctttaatctcctcttttatcttggactgacatttagcgtagctaagtgaaaaggtcatagctgagattcctggttcgggtgttacgcacacgtacttaaatgaaagcatgtggcatgttcatcgtataacacaatatgaatacagggcatgcattttgcagcagtgagtctcttcagaaaacccttttctacagttagggttgagttacttcctatcaagccagtacgtgctaacaggctcaatattcctgaatgaaatatcagactagtgacaagctcctggtcttgagatgtcttctcgttaaggagtagggccttttggaggtaaaggtata

SEQ ID NO: 485 - DNA, 1836 bp, Homo sapiens
atggcggcctcagcaaaaaagaagaataagaaggggaagactatctccctaacagactttctggctgaggatgggggtactggtggaggaagcacctatgtttccaaaccagtcagctgggctgatgaaacggatgacctggaaggagatgtttcgaccacttggcacagtaacgatgacgatgtgtatagggcgcctccaattgaccgttccatccttcccactgctccacgggctgctcgggaacccaatatcgaccggagccgtcttcccaaatcgccaccctacactgcttttctaggaaacctaccctatgatgttacagaagagtcaattaaggaattctttcgaggattaaatatcagtgcagtgcgtttaccacgtgaacccagcaatccagagaggttgaaaggttttggttatgctgaatttgaggacctggattccctgctcagtgccctgagtctcaatgaagagtctctaggtaacaggagaattcgagtggacgttgctgatcaagcacaggataaagacagggatgatcgttcttttggccgtgatagaaatcgggattctgacaaaacagatacagactggagggctcgtcctgctacagacagctttgatgactacccacctagaagaggtgatgatagctttggagacaagtatcgagatcgttatgattcagaccggtatcgggatgggtatcgggatgggtatcgggatggcccacgccgggatatggatcgatatggtggccgggatcgctatgatgaccgaggcagcagagactatgatagaggctatgattcccggataggcagtggcagaagagcatttggcagtgggtatcgcagggatgatgactacagaggaggcggggaccgctatgaagaccgatatgacagacgggatgatcggtcgtggagctccagagatgattactctcgggatgattataggcgtgatgatagaggtcccccccaaagacccaaactgaatctaaagcctcggagtactcctgaagaagatgattcctctgctagtacctcccagtccactcgagctgcttctatctttggaggggcaaagcctgttgacacagctgctagagaaagagaagtagaagaacggctacagaaggaacaagagaagttgcagcgtcagtggaatgagccaaaactagaacgacggcctcgggagagacacccaagctggcgaagtgaagaaactcaggaacgggaacggtcgaggacaggaagtgagtcatcacaaactgggacctccaccacatctagcagaaatgcacgaaggagagagagtgagaagtctctagaaaatgaaacactcaataaggaggaagattgccactctccaacttctaaacctcccaaacctgatcagcccctaaaggtaatgccagcccctccaccaaaggagaatgcttgggtgaagcgaagttctaaccctcctgctcgatctcagagctcagacacagagcagcagtcccctacaagtggtgggggaaaagtagctccagctcaaccatctgaggaaggaccaggaaggaaagatgaaaataaagtagatgggatgaatgccccaaaaggccaaactgggaactctagccgtggtccaggagacggagggaacagagaccactggaaggagtcagataggaaagatggcaaaaaggatcaagactccagatctgcacctgagccaaagaaacctgaggaaaatccagcttctaagttcagttctgcaagcaagtatgctgctctctctgttgatggtgaagatgaaaatgagggagaagattatgccgaatag

SEQ ID NO: 486 - DNA, 1866 bp, Homo sapiens
cgttcctcggcgccgccggggccccagagggcagcggcagcaacagcagcagcagcagcagcgggagtggagatggcggcggcggcggctcaggggggcgggggcggggagccccgtagaaccgagggggtcggcccgggggtcccgggggaggtggagatggtgaaggggcagccgttcgacgtgggcccgcgctacacgcagttgcagtacatcggcgagggcgcgtacggcatggtcagctcggcctatgaccacgtgcgcaagactcgcgtggccatcaagaagatcagccccttcgaacatcagacctactgccagcgcacgctccgggagatccagatcctgctgcgcttccgccatgagaatgtcatcggcatccgagacattctgcgggcgtccaccctggaagccatgagagatgtctacattgtgcaggacctgatggagactgacctgtacaagttgctgaaaagccagcagctgagcaatgaccatatctgctacttcctctaccagatcctgcggggcctcaagtacatccactccgccaacgtgctccaccgagatctaaagccctccaacctgctcagcaacaccacctgcgaccttaagatttgtgatttcggcctggcccggattgccgatcctgagcatgaccacaccggcttcctgacggagtatgtggctacgcgctggtaccgggccccagagatcatgctgaactccaagggctataccaagtccatcgacatctggtctgtgggctgcattctggctgagatgctctctaaccggcccatcttccctggcaagcactacctggatcagctcaaccacattctgggcatcctgggctccccatcccaggaggacctgaattgtatcatcaacatgaaggcccgaaactacctacagtctctgccctccaagaccaaggtggcttgggccaagcttttccccaagtcagactccaaagcccttgacctgctggaccggatgttaacctttaaccccaataaacggatcacagtggaggaagcgctggctcacccctacctggagcagtactatgacccgacggatgagccagtggccgaggagcccttcaccttcgccatggagctggatgacctacctaaggagcggctgaaggagctcatcttccaggagacagcacgcttccagcccggagtgctggaggccccctagcccagacagacatctctgcaccctggggcctggacctgcctcctgcctgcccctctcccgccagactgttagaaaatggacactgtgcccagcccggaccttggcagcccaggccggggtggagcatgggcctggccacctctctcctttgctgaggcctccagcttcaggcaggccaaggccttctcctccccacccgccctccccacggggcctcgggagctcaggtggccccagttcaatctcccgctgctgctgctgctgcgcccttaccttccccagcgtcccagtctctggcagttctggaatggaagggttctggctgccccaacctgctgaagggcagaggtggagggtggggggcgctgagtagggactcagggccatgcctgcccccctcatctcattcaaaccccaccctagtttccctgaaggaacattccttagtctcaagggctagcatccctgaggagccaggccgggccgaatcccctccctgtcaaagctgtcacttcgcgtgccctcgctgcttctgtgtgtggtgagcagaagtggagctggggggcgtggagagcccggcgcccctgccacctccctgacccgtctaatatataaatatagagatgtgtctatggctgaaaaaaaaaaaaaaaa

SEQ ID NO: 487 - DNA, 3033 bp, Homo sapiens
agcagtccccgggcttgcgcggcgcggagagggaggcgccccgcggcggggcccccactcggtcagcccgcgcgtcggtccccgcgcggccgccatgacctggagcgccacggcccggggcgcccaccagcccgacaacaccgccttcactcagcagcgcctccccgcctggcagccgctgctgtcggccagcatcgcgctgccgctcttcttctgcgcgggcctggccttcatcggcctgggcctgggcctctactactcctccaacggcatcaaggagctggagtacgactatacaggcgacccgggcaccggtaactgctcggtgtgcgccgcggctggccagggccgggcgctgccgcccccctgctcgtgcgcctggtacttctcgctgcccgagctcttccagggcccagtgtacctctactacgagctgaccaacttctaccagaacaaccggcgctacggcgtgtcccgcgacgacgcgcagctgagcggactccccagcgcgctgcgccaccctgtcaacgagtgcgccccctaccagcgcagcgcggccggcctgcccatcgcgccctgcggcgccatcgccaacagcctcttcaacgactccttctcgctttggcaccagcgccagcccggcgggccctacgtcgaggtgccgctcgaccgctccggcatcgcctggtggaccgactaccacgtcaagttccgcaacccgccgctggtcaacggcagcctggcgttggccttccagggcacggcgcccccgcccaactggcgccggccagtctacgagctcagccccgaccccaacaacaccggcttcatcaatcaggacttcgtggtgtggatgcgcacggcggcgctgcccacgttccgcaaactgtacgcgcgcatccgccagggcaactactcggccgggctgccgcggggcgcctaccgcgtcaacatcacctacaactacccggtgcgcgcgttcggcggccacaagctcctcatcttcagcagcatctcgtggatgggtggcaagaaccccttcctgggcatcgcctacctggtcgtcggctccctctgcatcctcaccggctttgtcatgctggtcgtctacattcgctaccaggaccaggacgacgacgacgaggagtgattccggctttccagggatccctcctgcttcttgccaaaactcttgcaaggtgcttttggcatctcctcctcgcccgtcacccaattccaacctcgcctagcttttcctccctttgtgaatgaggggaccagataagggaattaccccccttgctcttggggggctgctagactgtcttgccgcggggagggatgttgactgcagagtgaaacatccttgcaaactcttcccacctccttcacgacactgagttgccatgtgaggttcttcaagtctgagagtggaagggatccctatggagactcctattaaacccctattagaggaagagattgagagacctagcaatgtgaagtaacaaagatcaggcagctgcaagtgactcctgaatcttgagtccagggctttcgccactacagtacagtggttttcttttctttggtcggggagagtgggctggaatggagagtgaggcccacaaattacctgcagagacgtggaggcgtgagggagaacatgcttgttaaatatgcaggtagattaggagacaccaaacagagattcagacacagtaaggctgggatgagatcctcgaagctgtgttttaacaaactccactggagagtcccatattccctcaaatttgggaatcacgaccctgaaccaggttgggcctgaagcagtcaactgaattcactttttcggatagtaatttgttcccaggggcagtgacaaccatgatgttccaggtttggtctggcactctgccttgaacgtaggaagctcttgattttattgattaacatcaatcagtatgtttaaagttattctaagaagcaatagtttatttttaaaaaccttgtatagcaaaataacttaaaaccctttgtgatatcatcttaccagtttatttggtaaaaacaaacagttatttggtatttgtcagaattcttcagtgcctgctattacagctattttccaattactaacttgattatactcactcaaggcagtgcaagatcttgaagtactttttagcagttaagtaatattgaattgtattgaatagtttacatagtttattctagtctttgaaaattactgaacatggacaatgtgcatgtcattgacatctgccttagaacttctgggacaatcctgattcgagagattctatcccattatttacatataccaaaaatactttgttaatttaatgtgttggcttcccaactcctgaacacgacacaattttattattagattttgtatggtgattttaggctatgaaaacatgatcattatatgtatatagatacatttttatttgttacaaatgtttgagcagctcactagcccacccctcctctattttgggtaagagaatttactaccttttttaactatgtagttgagagcaacatgtattttgttatttttagaatggtcagtatattgctataaaattttaaatgagactatgaaagttaaagtattctgattctggttaaattaacgaatatggttccaggccctgttctctgggtttttgagagagaataaaggttatgtttgtcttacctttgttatcgagtttgctgaattcttttgaacgatgatcttaaaggcacaaacaccaccagccactttgctaatttcttaatagcagatttacattgcagcaagaaaaccatcttttatagtaacattcagttaaaatgaactcaattcattgttaacttcctaaaacagaatttgaactttatcaacctcaacgtgtatataaactagatagtcctcaatactttatcaacctcaacatgtatataaactagatagtcctcaaatactgtttgaatttaataaatgtcaatttaaaaatt

SEQ ID NO: 488 - DNA, 3533 bp, Homo sapiens
agcggaggagccgggcgcgcctgccacgcaaaactaccgggctggcagggcggcgggcgcggtgcgcgatcccgggtggcggcggcaacggcggtggtgacggcggcgactgcagcggccggctctcacctctcccctgtgcacccgcatctcgccgcgccgccgagcagccagcagtccccgggtcgcccagcccacgcgcgcacggccgagcccagcgcacaatagcggcgacagccatggggaaaccggcgaggaaaggatgcgagtggaagcgcttcctgaagaataactgggtgttgctgtccaccgtggccgcggtggtgctaggcattaccacaggagtcttggttcgagaacacagcaacctctcaactctagagaaattctactttgcttttcctggagaaattctaatgcggatgctgaaactcatcattttgccattaattatatccagcatgattacaggtgttgctgcactggattccaacgtatccggaaaaattggtgtgcgcgctgtcgtgtattatttctgtaccactctcattgctgttattctaggtattgtgctggtggtgagcatcaagcctggtgtcacccagaaagtgggtgaaattgcgaggacaggcagcacccctgaagtcagtacggtggatgccatgttagatctcatcaggaatatgttccctgagaatcttgtccaggcctgttttcagcagtacaaaactaagcgtgaagaagtgaagcctcccagcgatccagagatgaacatgacagaagagtccttcacagctgtcatgacaactgcaatttccaagaacaaaacaaaggaatacaaaattgttggcatgtattcagatggcataaacgtcctgggcttgattgtcttttgccttgtctttggacttgtcattggaaaaatgggagaaaagggacaaattctggtggatttcttcaatgctttgagtgatgcaaccatgaaaatcgttcagatcatcatgtgttatatgccactaggtattttgttcctgattgctgggaagatcatagaagttgaagactgggaaatattccgcaagctgggcctttacatggccacagtcctgactgggcttgcaatccactccattgtaattctcccgctgatatatttcatagtcgtacgaaagaaccctttccgatttgccatgggaatggcccaggctctcctgacagctctcatgatctcttccagttcagcaacactgcctgtcaccttccgctgtgctgaagaaaataaccaggtggacaagaggatcactcgattcgtgttacccgttggtgcaacaatcaacatggatgggactgcgctctatgaagcagtggcagcggtgtttattgcacagttgaatgacctggacttgggcattgggcagatcatcaccatcagtatcacggccacatctgccagcatcggagctgctggcgtgccccaggctggcctggtgaccatggtgattgtgctgagtgccgtgggcctgcccgccgaggatgtcaccctgatcattgctgtcgactggctcctggaccggttcaggaccatggtcaacgtccttggtgatgcttttgggacgggcattgtggaaaagctctccaagaaggagctggagcagatggatgtttcatctgaagtcaacattgtgaatccctttgccttggaatccacaatccttgacaacgaagactcagacaccaagaagtcttatgtcaatggaggctttgcagtagacaagtctgacaccatctcattcacccagacctcacagttctagggcccctggctgcagatgactggaaacaaggaaggacatttccgtgagagtcatctcaaacactgcttaaggaaaagagaaacactaatggccaagtgtacatttgatttgatatacagacctccagattattttctatatttggattcacagcctttgcgctctgggttttgggatttgggtgtggggtaagttgaagggaaatcaatttaaaggaaagttctattatctgggttttagaaattctataagagacaaagtttggaagtacataaagtaataactgttagaattaggtaatggatatgaaagagaaaatgctttctcatgcatagacaagtgttttgggtttttaaaaaaaatattctgtcattggttacaaatttttactcaggctttctattggcatggatttcctttgacctctcacttttttataaattataatgcatctaaaccacctgtccccagttaatgtgccaaaatgtcaatttttaacttatctccagccaatttcaaagaaaacagaccagcatagttctgcaataacagttttaagatgggcatagggtttggaagaaagagagaaggattcttttttcaatgtactgtattgggacgctggtaactgttaacccagtgttcagcatagagctatatatatatatatatgtatatatttattattttcatataatttgccagacagagatcagaattgaaccgtcaatgtgaaataaagagttctccttgtacttgaataataaccacgattccaacccaggtctgctttggggcttatcagaactcctttctaaggagcactagaatgagaaatcatgttgttcgatcgtttcacatctgtatatcagctctaaagcagagatgtattatggtgatactccaaggtggcatagccattcatttacaacttccagatttgagctgcctggagggaatccatatcagctctgcataagattatatacaaagctgtcactcacaaaaggctggatgtgctttcatccaactggaaggctttattcttccaagttcattcatactcaaagaggccagtactttgccatccttgcactttctgttatcagggcccaaataacagtggcaagctaccaactaagttgtattttaataaagattccatgggttgaacaagccacgttgcagaaaaagagcttcccctaacctgggttgttgcagagtaaatcccacgacataagctggtatcactggttcgggggaaatagttccattctatgactcttgtctcctcctccaggaggactgttctaactagtaatcttggccctattcattacatcctctgcttgtcattctgctaatttatgaagatagtttattatagtctgtacttcagttctcatcttgtaaataatgcttaacataaacttgtacttacactgaaatccaaaatagtcatgtttctgcagtattctgtagccaacttaaacctgtgctttcatgtttaagaaatgagaaattgtgccaaagatagcagaagagtagataagtgctcagtattgacgacctacatctgaaatctacaacataatgatactgaattgttatgtaaacatcataaatagtaaataatgattcaatgtgaattttaaaatgcaaatattgctattgtttataggaaataaatctaaatataaacgaaaaaaaaaaaaaaaa

SEQ ID NO: 489 - DNA, 3263 bp, Homo sapiens
ggcatcactcgagcccaggtcccagtcatcaccactcacagcgctcggcgttcaggaagaggagcaccagcggagcgcggctgcttcagcggcgggcgggcgccagaaaggccccgatcgaaaagcctgggagggccgccgaactacccccggagggaggagccagtccgaacccaaggcgccaccgccgcagaagcggagcgaggcagcattcgcctccatggcccactcgccggtggctgtccaagtgcctgggatgcagaataacatagctgatccagaagaactgttcacaaaattagagcgcattgggaaaggctcatttggggaagttttcaaaggaattgataaccgtacccagcaagtcgttgctattaaaatcatagaccttgaggaagccgaagatgaaatagaagacattcagcaagaaataactgtcttgagtcaatgtgacagctcatatgtaacaaaatactatgggtcatatttaaaggggtctaaattatggataataatggaatacctgggcggtggttcagcactggatcttcttcgagctggtccatttgatgagttccagattgctaccatgctaaaggaaattttaaaaggtctggactatctgcattcagaaaagaaaattcaccgagacataaaagctgccaatgtcttgctctcagaacaaggagatgttaaacttgctgattttggagttgctggtcagctgacagatacacagattaaaagaaatacctttgtgggaactccattttggatggctcctgaagttattcaacagtcagcttatgactcaaaagctgacatttggtcattgggaattactgctattgaactagccaagggagagccacctaactccgatatgcatccaatgagagttctgtttcttattcccaaaaacaatcctccaactcttgttggagactttactaagtcttttaaggagtttattgatgcttgcctgaacaaagatccatcatttcgtcctacagcaaaagaacttctgaaacacaaattcattgtaaaaaattcaaagaagacttcttatctgactgaactgatagatcgttttaagagatggaaggcagaaggacacagtgatgatgaatctgattccgagggctctgattcggaatctaccagcagggaaaacaatactcatcctgaatggagctttaccaccgtacgaaagaagcctgatccaaagaaagtacagaatggggcagagcaagatcttgtgcaaaccctgagttgtttgtctatgataatcacacctgcatttgctgaacttaaacagcaggacgagaataacgctagcaggaatcaggcgattgaagaactcgagaaaagtattgctgtggctgaagccgcctgtcccggcatcacagataaaatggtgaagaaactaattgaaaaatttcaaaagtgttcagcagacgaatccccctaagaaacttattattggcttctgtttcatatggacccagagagccccaccaaacctacgtcaagattaacaatgcttaacccatgagctccatgtgccttttggatctttgcaacactgaagatttggaagaagctattaaactattttgtgatggcgtttatcattttatattttgaaaggattattttgtaaggaataacttttaatactatagtttcacctgtattctagtaaatgttgagacaccgttttgcttttaagtatccctatttcttaagttacgaggatgaatacctttcacattttgatctttagttgactctacagtcatgaaacatacaggtctttcaaagtcattctcaatattcagcttttgtaaattatcaagcttcaaaaagctttttttttaaaaaaaaaaacatgcatattctaaaaatgactattggtggggaggtgtaaataagtcataccttcttaaaacagaaaatttaagtaaagtcttttaaatgaaacctgtaaaagtattgactcttctaccaagttggtatgatattccaggcagctcaatgattatcacatttgagaccctgtgtttgaagcatttacaggcaatgtacagcaacagaggtacctcttggtgtatagtatttacattctcttttaggtagaagaggcaattttacccttatttcacatggttagaaatttaaagcaagatcatttacccaaggataggtgtttggtaatgttgaaggagttagtctggcttcatgttttacatcttcaactaaaatcccatactatctgcttggatttggagagccaaaaaataaagctgattgtcatgtgattaaatatctgatcaacaggtatgaatataacttaaatcagcatatttttgccatggtaataaattgtcctataaactatttatatatttttgttcttcataattatcactaataagcatcagtttgttgtttttaaaaggatatttaagtgagcattttctagttcatatgaaaataaccatagtacaggatgatttctgtccacacaaaggttaaattagattgcacagttaattttcacttatatttatggtactattatgtgggtgatgcctttttcttttaagcccagtacatatattatgcctgcctaagttctgaactggggctgtatttcagtagttgtagaattattgatatttagttttgatagctaatgtttaattgtttggatctgcacagtttggtttttgcacaaaagtcatttaaaaaaatctgagtaattgtcaaatattaaaagaaagatattcttcctgtaaggaatacagtttttagtcaaagtggccattacatcctctttttaatttacataatacagatacttgagaaagttgttgtggtgttgtatgccaagaaaattctttttattggtgcctatattgtaacaattatttttaatgcattgtattttgaagtaacggttcagttaaatttttcacctgctgtgtaactgaagcacaattacagtttataatcatctgtagaagtctggagataattttgcaactcatgttatgggttaaatgaatatttttgtaaaagtaaaagcaacaaatttataaattgattatttgaaactttacaacacaattgcatcccaaatacaaattgtattgcttattcattatagctattcgtcctgtaatctgtttctaggtgaagcatactccagtgttttaggggttttgaaaataaatatttaaatttcacagtcaaaaaaa

SEQ ID NO: 490 - DNA, 3197 bp, Homo sapiens
ggaccacagctcctcccgtgcatccactcggcctgggaggttctggattttggctgtcgagggagtttgcctgcctctccagagaaagatggtcatgaggcccctgtggagtctgcttctctgggaagccctacttcccattacagttactggtgcccaagtgctgagcaaagtcgggggctcggtgctgctggtggcagcgcgtccccctggcttccaagtccgtgaggctatctggcgatctctctggccttcagaagagctcctggccacgtttttccgaggctccctggagactctgtaccattcccgcttcctgggccgagcccagctacacagcaacctcagcctggagctcgggccgctggagtctggagacagcggcaacttctccgtgttgatggtggacacaaggggccagccctggacccagaccctccagctcaaggtgtacgatgcagtgcccaggcccgtggtacaagtgttcattgctgtagaaagggatgctcagccctccaagacctgccaggttttcttgtcctgttgggcccccaacatcagcgaaataacctatagctggcgacgggagacaaccatggactttggtatggaaccacacagcctcttcacagacggacaggtgctgagcatttccctgggaccaggagacagagatgtggcctattcctgcattgtctccaaccctgtcagctgggacttggccacagtcacgccctgggatagctgtcatcatgaggcagcaccagggaaggcctcctacaaagatgtgctgctggtggtggtgcctgtctcgctgctcctgatgctggttactctcttctctgcctggcactggtgcccctgctcagggaaaaagaaaaaggatgtccatgctgacagagtgggtccagagacagagaacccccttgtgcaggatctgccataaaggacaatatgaactgatgcctggactatcagtaaccccactgcacaggcacacgatgctctgggacataactggtgcctggaaatcaccatggtcctcatatctcccatgggaatcctgtcctgcctcgaaggagcagcctgggcagccatcacaccacgaggacaggaagcaccagcacgtttcacacctcccccttccctctcccatcttctcatatcctggctcttctctgggcaagatgagccaagcagaacattccatccaggacactggaagttctccaggatccagatccatggggacattaatagtccaaggcattccctcccccaccactattcataaagtattaaccaactggcaccaaggaattgcctccagcctgagtcctaggctctaaaagatattacatatttgaactaatagaggaactctgagtcacccatgccagcatcagcttcagccccagaccctgcagtttgagatctgatgcttcctgagggccaaggcattgctgtaagaaaaggtctagaaataggtgaaagtgagaggtgggggacaggggtttctctttctggcctaaggactttcaggtaatcagagttcatgggccctcaaaggtaaattgcagttgtagacaccgaggatggttgacaacccatggttgagatgggcaccgttttgcaggaaacaccatattaatagacatcctcaccatctccatccgctctcacgcctcctgcaggatctgggagtgagggtggagagtctttcctcacgctccagcacagtggccaggaaaagaaatactgaatttgccccagccaacaggacgttcttgcacaacttcaagaaaagcagctcagctcaggatgagtcttcctgcctgaaactgagagagtgaagaaccataaaacgctatgcagaaggaacattatggagagaaagggtactgaggcactctagaatctgccacattcattttcaaatgcaaatgcagaagacttaccttagttcaaggggaggggacaaagaccccacagcccaacagcaggactgtagaggtcactctgactccatcaaactttttattgtggccatcttaggaaaatacattctgcccctgaatgattctgtctagaaaagctctggagtattgatcactactggaaaaacacttaaggagctaaacttaccttcggggattattagctgataaggttcacagtttctctcacccaggtgtaactggattttttctggggcctcaatccagtcttgataacagcgaggaaagaggtattgaagaaacaggggtgggtttgaagtactattttccccagggtggcttcaatctccccacctaggatgtcagccctgtccaaggaccttccctcttctcccccagttccctgggcaatcacttcaccttggacaaaggatcagcacagctggcctccagatccacatcaccactcttccactcgattgttcccagatcctccctgcctggcctgctcagaggttccctgttggtaacctggctttatcaaattctcatccctttcccacacccacttctctcctatcaccttcccccaagattacctgaacagggtccatggccactcaacctgtcagcttgcaccatccccacctgccacctacagtcaggccacatgcctggtcactgaatcatgcaaaactggcctcagtccctaaaaatgatgtggaaaggaaagcccaggatctgacaatgagccctggtggatttgtggggaaaaaatacacagcactccccacctttctttcgttcatctccagggccccacctcagatcaaagcagctctggatgagatgggacctgcagctctccctccacaaggtgactcttagcaacctcatttcgacagtggtttgtagcgtggtgcaccagggccttgttgaacagatccacactgctctaataaagttcccatccttaatgactcacttgtcaactagtggactaattaaccctccaccaaaaaaacacaaagtgcttctgtgagaccaattttgtgctaatgagcattgagactgatgctttgtaagtcacaccacaacaaatattgattgagggcgctgcatgtgctgggtacatttcttggcacttgggaatcagtagtcaagcgaaacccttgcctttgagagtttatggtctggataatataaataaacaagtaagcataaaaaaaaaaaaaaaaa

SEQ ID NO: 491 - DNA, 1646 bp, Homo sapiens
acagaataatggcgtctcgtagccccaggcgacagcgtggaggggcgggtctgtcgattggatgaacgcagctgagattactcccagccactaaggacgaagaggtggggcggtggcgtcccacgcctcgtgcgacagtgggcggggctttgttgcctgagtaaccgtatgatggtggtggtggtggtgtcttcctgtctcaacgatacctattttctagtgctgagatcctgagacaatgaatcatagtgaaagattcgttttcattgcagagtggtatgatccaaatgcttcacttcttcgacgttatgagcttttattttacccaggggatggatctgttgaaatgcatgatgtaaagaatcatcgcacctttttaaagcggaccaaatatgataacctgcacttggaagatttatttataggcaacaaagtgaatgtcttttctcgacaactggtattaattgactatggggatcaatatacagctcgccagctgggcagtaggaaagaaaaaacgctagccctaattaaaccagatgcaatatcaaaggctggagaaataattgaaataataaacaaagctggatttactataaccaaactcaaaatgatgatgctttcaaggaaagaagcattggattttcatgtagatcaccagtcaagaccctttttcaatgagctgatccagtttattacaactggtcctattattgccatggagattttaagagatgatgctatatgtgaatggaaaagactgctgggacctgcaaactctggagtggcacgcacagatgcttctgaaagcattagagccctctttggaacagatggcataagaaatgcagcgcatggccctgattcttttgcttctgcggccagagaaatggagttgttttttccttcaagtggaggttgtgggccggcaaacactgctaaatttactaattgtacctgttgcattgttaaaccccatgctgtcagtgaaggactgttgggaaagatcctgatggctatccgagatgcaggttttgaaatctcagctatgcagatgttcaatatggatcgggttaatgttgaggaattctatgaagtttataaaggagtagtgaccgaatatcatgacatggtgacagaaatgtattctggcccttgtgtagcaatggagattcaacagaataatgctacaaagacatttcgagaattttgtggacctgctgatcctgaaattgcccggcatttacgccctggaactctcagagcaatctttggtaaaactaagatccagaatgctgttcactgtactgatctgccagaggatggcctattagaggttcaatacttcttcaagatcttggataattagtggtgtggaaagtaaagaagtcacaggttgggacatttagacaagagtgaatcacacacgaggaatgtgttcattcttttattgtccgttgttttaacctgactgaatacaagatcaacaagagcactgtactcctggcaattattacatatgttagaacatggattttgcactgtagacaacatttaacaccagtctatggggtactgcattgctttttataaagttcaaaataaagatttattttcaaacaaaaaaaaaaaaaaaaaaaaaaaaa

SEQ ID NO: 492 - protein, 158 aa, Homo sapiens
MMQKLLKCSRLVLALALILVLESSVQGYPTRRARYQWVRCNPDSNSANCLEEKGPMFELLPGESNKIPRLRTDLFPKTRIQDLNRIFPLSEDYSGSGFGSGSGSGSGSGSGFLTEMEQDYQLVDESDAFHDNLRSLDRNLPSDSQDLGQHGLEEDFML

SEQ ID NO: 493 - protein, 592 aa, Homo sapiens
MASEIHMTGPMCLIENTNGRLMANPEALKILSAITQPMVVVAIVGLYRTGKSYLMNKLAGKKKGFSLGSTVQSHTKGIWMWCVPHPKKPGHILVLLDTEGLGDVEKGDNQNDSWIFALAVLLSSTFVYNSIGTINQQAMDQLYYVTELTHRIRSKSSPDENENEVEDSADFVSFFPDFVWTLRDFSLDLEADGQPLTPDEYLTYSLKLKKGTSQKDETFNLPRLCIRKFFPKKKCFVFDRPVHRRKLAQLEKLQDEELDPEFVQQVADFCSYIFSNSKTKTLSGGIQVNGPRLESLVLTYVNAISSGDLPCMENAVLALAQIENSAAVQKAIAHYEQQMGQKVQLPTESLQELLDLHRDSEREAIEVFIRSSFKDVDHLFQKELAAQLEKKRDDFCKQNQEASSDRCSGLLQVIFSPLEEEVKAGIYSKPGGYRLFVQKLQDLKKKYYEEPRKGIQAEEILQTYLKSKESMTDAILQTDQTLTEKEKEIEVERVKAESAQASAKMLQEMQRKNEQMMEQKERSYQEHLKQLTEKMENDRVQLLKEQERTLALKLQEQEQLLKEGFQKESRIMKNEIQDLQTKMRRRKACTIS

SEQ ID NO: 494 - protein, 632 aa, Homo sapiens
MSRVRDAGCVAAGIVIGAGAWYCVYKYTRGRDQTKKRMAKPKNRAVAGTGARARAGLRAGFTIDLGSGFSPPTPVRAEAEDRAQDEASALDTVGAEAVAPAASSAEAQSGAGSQAQEADGAGVGPKAESVVGAAMASAIAPPPGVTEALGAAEAPAMAGAPKVAEAPREAETSRAAVPPGTVVPTEAAAPTEVTEGPGVAAPTKVAEAPGVASPTEAAEAPVPATPTGAAAPTGAAESPGTSGSPRTAVVPGTSAAKKATPGAHTGAIPKATSATGAVPKGGGKGVTRSRNGGKGKGKKSKVEVDELGMGFRPGDGAAAAAAASANGGQAFLAEVPDSEEGESGWTDTESDSDSEPETQRRGRGRRPVAMQKRPFPYEIDEILGVRDLRKVLALLQKSDDPFIQQVALLTLSNNANYSCNQETIRKLGGLPIIANMINKTDPHIKEKALMAMNNLSENYENQGRLQVYMNKVMDDIMASNLNSAVQVVGLKFLTNMTITNDYQHLLVNSIANFFRLLSQGGGKIKVEILKILSNFAENPDMLKKLLSTQVPASFSSLYNSYVESEILINALTLFEIIYDNLRAEVFNYREFNKGSLFYLCTTSGVCVKKIRALANHHDLLVKVKVIKLVNKF

SEQ ID NO: 495 - protein, 219 aa, Homo sapiens
MGMSSLKLLKYVLFFFNLLFWICGCCILGFGIYLLIHNNFGVLFHNLPSLTLGNVFVIVGSIIMVVAFLGCMGSIKENKCLLMSFFILLLIILLAEVTLAILLFVYEQKLNEYVAKGLTDSIHRYHSDNSTKAAWDSIQSFLQCCGINGTSDWTSGPPASCPSDRKVEGCYAKARLWFHSNFLYIGIITICVCVIEVLGMSFALTLNCQIDKTSQTIGL

SEQ ID NO: 496 - protein, 739 aa, Homo sapiens
MPGKMVVILGASNILWIMFAASQAFKIETTPESRYLAQIGDSVSLTCSTTGCESPFFSWRTQIDSPLNGKVTNEGTTSTLTMNPVSFGNEHSYLCTATCESRKLEKGIQVEIYSFPKDPEIHLSGPLEAGKPITVKCSVADVYPFDRLEIDLLKGDHLMKSQEFLEDADRKSLETKSLEVTFTPVIEDIGKVLVCRAKLHIDEMDSVPTVRQAVKELQVYISPKNTVISVNPSTKLQEGGSVTMTCSSEGLPAPEIFWSKKLDNGNLQHLSGNATLTLIAMRMEDSGIYVCEGVNLIGKNRKEVELIVQEKPFTVEISPGPRIAAQIGDSVMLTCSVMGCESPSFSWRTQIDSPLSGKVRSEGTNSTLTLSPVSFENEHSYLCTVTCGHKKLEKGIQVELYSFPRDPEIEMSGGLVNGSSVTVSCKVPSVYPLDRLEIELLKGETILENIEFLEDTDMKSLENKSLEMTFIPTIEDTGKALVCQAKLHIDDMEFEPKQRQSTQTLYVNVAPRDTTVLVSPSSILEEGSSVNMTCLSQGFPAPKILWSRQLPNGELQPLSENATLTLISTKMEDSGVYLCEGINQAGRSRKEVELIIQVTPKDIKLTAFPSESVKEGDTVIISCTCGNVPETWIILKKKAETGDTVLKSIDGAYTIRKAQLKDAGVYECESKNKVGSQLRSLTLDVQGRENNKDYFSPELLVLYFASSLIIPAIGMIIYFARKANMKGSYSLVEAQKSKV

SEQ ID NO: 497 - protein, 441 aa, Homo sapiens
MAEPRQEFEVMEDHAGTYGLGDRKDQGGYTMHQDQEGDTDAGLKESPLQTPTEDGSEEPGSETSDAKSTPTAEDVTAPLVDEGAPGKQAAAQPHTEIPEGTTAEEAGIGDTPSLEDEAAGHVTQARMVSKSKDGTGSDDKKAKGADGKTKIATPRGAAPPGQKGQANATRIPAKTPPAPKTPPSSGEPPKSGDRSGYSSPGSPGTPGSRSRTPSLPTPPTREPKKVAVVRTPPKSPSSAKSRLQTAPVPMPDLKNVKSKIGSTENLKHQPGGGKVQIINKKLDLSNVQSKCGSKDNIKHVPGGGSVQIVYKPVDLSKVTSKCGSLGNIHHKPGGGQVEVKSEKLDFKDRVQSKIGSLDNITHVPGGGNKKIETHKLTFRENAKAKTDHGAEIVYKSPVVSGDTSPRHLSNVSSTGSIDMVDSPQLATLADEVSASLAKQGL

SEQ ID NO: 498 - protein, 476 aa, Homo sapiens
MMTAKAVDKIPVTLSGFVHQLSDNIYPVEDLAATSVTIFPNAELGGPFDQMNGVAGDGMINIDMTGEKRSLDLPYPSSFAPVSAPRNQTFTYMGKFSIDPQYPGASCYPEGIINIVSAGILQGVTSPASTTASSSVTSASPNPLATGPLGVCTMSQTQPDLDHLYSPPPPPPPYSGCAGDLYQDPSAFLSAATTSTSSSLAYPPPPSYPSPKPATDPGLFPMIPDYPGFFPSQCQRDLHGTAGPDRKPFPCPLDTLRVPPPLTPLSTIRNFTLGGPSAGVTGPGASGGSEGPRLPGSSSAAAAAAAAAAYNPHHLPLRPILRPRKYPNRPSKTPVHERPYPCPAEGCDRRFSRSDELTRHIRIHTGHKPFQCRICMRNFSRSDHLTTHIRTHTGEKPFACDYCGRKFARSDERKRHTKIHLRQKERKSSAPSASVPAPSTASCSGGVQPGGTLCSSNSSSLGGGPLAPCSSRTRTP

SEQ ID NO: 499 - protein, 406 aa, Homo sapiens
MSGCPFLGNNFGYTFKKLPVEGSEEDKSQTGVNRASKGGLIYGNYLHLEKVLNAQELQSETKGNKIHDEHLFIITHQAYELWFKQILWELDSVREIFQNGHVRDERNMLKVVSRMHRVSVILKLLVQQFSILETMTALDFNDFREYLSPASGFQSLQFRLLENKIGVLQNMRVPYNRRHYRDNFKGEENELLLKSEQEKTLLELVEAWLERTPGLEPHGFNFWGKLEKNITRGLEEEFIRIQAKEESEEKEEQVAEFQKQKEVLLSLFDEKRHEHLLSKGERRLSYRALQGALMIYFYREEPRFQVPFQLLTSLMDIDSLMTKWRYNHVCMVHRMLGSKAGTGGSSGYHYLRSTVSDRYKVFVDLFNLSTYLIPRHWIPKMNPTIHKFLYTAEYCDSSYFSSDESD

SEQ ID NO: 500 - protein, 470 aa, Homo sapiens
MLRGISQLPAVATMSWVLLPVLWLIVQTQAIAIKQTPELTLHEIVCPKKLHILHKREIKNNQTEKHGKEERYEPEVQYQMILNGEEIILSLQKTKHLLGPDYTETLYSPRGEEITTKPENMEHCYYKGNILNEKNSVASISTCDGLRGYFTHHHQRYQIKPLKSTDEKEHAVFTSNQEEQDPANHTCGVKSTDGKQGPIRISRSLKSPEKEDFLRAQKYIDLYLVLDNAFYKNYNENLTLIRSFVFDVMNLLNVIYNTIDVQVALVGMEIWSDGDKIKVVPSASTTFDNFLRWHSSNLGKKIHDHAQLLSGISFNNRRVGLAASNSLCSPSSVAVIEAKKKNNVALVGVMSHELGHVLGMPDVPFNTKCPSGSCVMNQYLSSKFPKDFSTSCRAHFERYLLSQKPKCLLQAPIPTNIMTTPVCGNHLLEVGEDCDCGSPKECTNLCCEALTCKLKPGTDCGGDAPNHTTE

SEQ ID NO: 501 - protein, 347 aa, Homo sapiens
MTLDHQIINPTLKWSQPAVPSGGPLVQHAHTTLDSDAGLTENPLTKLLAIGKEDDNAQWHMEDVIEDIIGMESSFKEEGADSPLLMQRTLSGSILDVYSGEQGISPINMGLTSASCPSSLPMKREITETDTRALAKERQKKDNHNLIERRRRYNINYRIKELGTLIPKSNDPDMRWNKGTILKASVEYIKWLQKEQQRARELEHRQKKLEQANRRLLLRIQELEIQARTHGLPTLASLGTVDLGAHVTKQQSHPEQNSVDYCQQLTVSQGPSPELCDQAIAFSDPLSYFTDLSFSAALKEEQRLDGMLLDDTISPFGTDPLLSATSPAVSKESSRRSSFSSDDGDEL

SEQ ID NO: 502 - protein, 162 aa, Homo sapiens
MKETIMNQEKLAKLQAQVRIGGKGTARRKKKVVHRTATADDKKLQFSLKKLGVNNISGIEEVNMFTNQGTVIHFNNPKVQASLAANTFTITGHAETKQLTEMLPSILNQLGADSLTSLRRLAEALPKQSVDGKAPLATGEDDDDEVPDLVENFDEASKNEAN

SEQ ID NO: 503 - protein, 2602 aa, Homo sapiens
MPVTEKDLAEDAPWKKIQQNTFTRWCNEHLKCVNKRIGNLQTDLSDGLRLIALLEVLSQKRMYRKYHQRPTFRQMQLENVSVALEFLDRESIKLVSIDSKAIVDGNLKLILGLVWTLILHYSISMPVWEDEGDDDAKKQTPKQRLLGWIQNKIPYLPITNFNQNWQDGKALGALVDSCAPGLCPDWESWDPQKPVDNAREAMQQADDWLGVPQVITPEEIIHPDVDEHSVMTYLSQFPKAKLKPGAPLKPKLNPKKARAYGRGIEPTGNMVKQPAKFTVDTISAGQGDVMVFVEDPEGNKEEAQVTPDSDKNKTYSVEYLPKVTGLHKVTVLFAGQHISKSPFEVSVDKAQGDASKVTAKGPGLEAVGNIANKPTYFDIYTAGAGVGDIGVEVEDPQGKNTVELLVEDKGNQVYRCVYKPMQPGPHVVKIFFAGDTIPKSPFVVQVGEACNPNACRASGRGLQPKGVRIRETTDFKVDTKAAGSGELGVTMKGPKGLEELVKQKDFLDGVYAFEYYPSTPGRYSIAITWGGHHIPKSPFEVQVGPEAGMQKVRAWGPGLHGGIVGRSADFVVESIGSEVGSLGFAIEGPSQAKIEYNDQNDGSCDVKYWPKEPGEYAVHIMCDDEDIKDSPYMAFIHPATGGYNPDLVRAYGPGLEKSGCIVNNLAEFTVDPKDAGKAPLKIFAQDGEGQRIDIQMKNRMDGTYACSYTPVKAIKHTIAVVWGGVNIPHSPYRVNIGQGSHPQKVKVFGPGVERSGLKANEPTHFTVDCTEAGEGDVSVGIKCDARVLSEDEEDVDFDIIHNANDTFTVKYVPPAAGRYTIKVLFASQEIPASPFRVKVDPSHDASKVKAEGPGLSKAGVENGKPTHFTVYTKGAGKAPLNVQFNSPLPGDAVKDLDIIDNYDYSHTVKYTPTQQGNMQVLVTYGGDPIPKSPFTVGVAAPLDLSKIKLNGLENRVEVGKDQEFTVDTRGAGGQGKLDVTILSPSRKVVPCLVTPVTGRENSTAKFIPREEGLYAVDVTYDGHPVPGSPYTVEASLPPDPSKVKAHGPGLEGGLVGKPAEFTIDTKGAGTGGLGLTVEGPCEAKIECSDNGDGTCSVSYLPTKPGEYFVNILFEEVHIPGSPFKADIEMPFDPSKVVASGPGLEHGKVGEAGLLSVNCSEAGPGALGLEAVSDSGTKAEVSIQNNKDGTYAVTYVPLTAGMYTLTMKYGGELVPHFPARVKVEPAVDTSRIKVFGPGIEGKDVFREATTDFTVDSRPLTQVGGDHIKAHIANPSGASTECFVTDNADGTYQVEYTPFEKGLHVVEVTYDDVPIPNSPFKVAVTEGCQPSRVQAQGPGLKEAFTNKPNVFTVVTRGAGIGGLGITVEGPSESKINCRDNKDGSCSAEYIPFAPGDYDVNITYGGAHIPGSPFRVPVKDVVDPSKVKIAGPGLGSGVRARVLQSFTVDSSKAGLAPLEVRVLGPRGLVEPVNMVDNGDGTHTVTYTPSQEGPYMVSVKYADEEIPRSPFKVKVLPTYDASKVTASGPGLSSYGVPASLPVDFAIDARDAGEGLLAVQITDQEGKPKRAIVHDNKDGTYAVTYIPDKTGRYMIGVTYGGDDIPLSPYRIRATQTGDASKCLATGPGIASTVKTGEEVGFVVDAKTAGKGKVTCTVLTPDGTEAEADVIENEDGTYDIFYTAAKPGTYVIYVRFGGVDIPNSPFTVMATDGEVTAVEEAPVNACPPGFRPWVTEEAYVPVSDMNGLGFKPFDLVIPFAVRKGEITGEVHMPSGKTATPEIVDNKDGTVTVRYAPTEVGLHEMHIKYMGSHIPESPLQFYVNYPNSGSVSAYGPGLVYGVANKTATFTIVTEDAGEGGLDLAIEGPSKAEISCIDNKDGTCTVTYLPTLPGDYSILVKYNDKHIPGSPFTAKITDDSRRCSQVKLGSAADFLLDISETDLSSLTASIKAPSGRDEPCLLKRLPNNHIGISFIPREVGEHLVSIKKNGNHVANSPVSIMVVQSEIGDARRAKVYGRGLSEGRTFEMSDFIVDTRDAGYGGISLAVEGPSKVDIQTEDLEDGTCKVSYFPTVPGVYIVSTKFADEHVPGSPFTVKISGEGRVKESITRTSRAPSVATVGSICDLNLKIPEINSSDMSAHVTSPSGRVTEAEIVPMGKNSHCVRFVPQEMGVHTVSVKYRGQHVTGSPFQFTVGPLGEGGAHKVRAGGPGLERGEAGVPAEFSIWTREAGAGGLSIAVEGPSKAEITFDDHKNGSCGVSYIAQEPGNYEVSIKFNDEHIPESPYLVPVIAPSDDARRLTVMSLQESGLKVNQPASFAIRLNGAKGKIDAKVHSPSGAVEECHVSELEPDKYAVRFIPHENGVHTIDVKFNGSHVVGSPFKVRVGEPGQAGNPALVSAYGTGLEGGTTGIQSEFFINTTRAGPGTLSVTIEGPSKVKMDCQETPEGYKVMYTPMAPGNYLISVKYGGPNHIVGSPFKAKVTGQRLVSPGSANETSSILVESVTRSSTETCYSAIPKASSDASKVTSKGAGLSKAFVGQKSSFLVDCSKAGSNMLLIGVHGPTTPCEEVSMKHVGNQQYNVTYVVKERGDYVLAVKWGEEHIPGSPFHVTVP

SEQ ID NO: 504 - protein, 760 aa, Homo sapiens
MMDQARSAFSNLFGGEPLSYTRFSLARQVDGDNSHVEMKLAVDEEENADNNTKANVTKPKRCSGSICYGTIAVIVFFLIGFMIGYLGYCKGVEPKTECERLAGTESPVREEPGEDFPAARRLYWDDLKRKLSEKLDSTDFTSTIKLLNENSYVPREAGSQKDENLALYVENQFREFKLSKVWRDQHFVKIQVKDSAQNSVIIVDKNGRLVYLVENPGGYVAYSKAATVTGKLVHANFGTKKDFEDLYTPVNGSIVIVRAGKITFAEKVANAESLNAIGVLIYMDQTKFPIVNAELSFFGHAHLGTGDPYTPGFPSFNHTQFPPSRSSGLPNIPVQTISRAAAEKLFGNMEGDCPSDWKTDSTCRMVTSESKNVKLTVSNVLKEIKILNIFGVIKGFVEPDHYVVVGAQRDAWGPGAAKSGVGTALLLKLAQMFSDMVLKDGFQPSRSIIFASWSAGDFGSVGATEWLEGYLSSLHLKAFTYINLDKAVLGTSNFKVSASPLLYTLIEKTMQNVKHPVTGQFLYQDSNWASKVEKLTLDNAAFPFLAYSGIPAVSFCFCEDTDYPYLGTTMDTYKELIERIPELNKVARAAAEVAGQFVIKLTHDVELNLDYERYNSQLLSFVRDLNQYRADIKEMGLSLQWLYSARGDFFRATSRLTTDFGNAEKTDRFVMKKLNDRVMRVEYHFLSPYVSPKESPFRHVFWGSGSHTLPALLENLKLRKQNNGAFNETLFRNQLALATWTIQGAANALSGDVWDIDNEF

SEQ ID NO: 505 - protein, 611 aa, Homo sapiens
MAASAKKKNKKGKTISLTDFLAEDGGTGGGSTYVSKPVSWADETDDLEGDVSTTWHSNDDDVYRAPPIDRSILPTAPRAAREPNIDRSRLPKSPPYTAFLGNLPYDVTEESIKEFFRGLNISAVRLPREPSNPERLKGFGYAEFEDLDSLLSALSLNEESLGNRRIRVDVADQAQDKDRDDRSFGRDRNRDSDKTDTDWRARPATDSFDDYPPRRGDDSFGDKYRDRYDSDRYRDGYRDGYRDGPRRDMDRYGGRDRYDDRGSRDYDRGYDSRIGSGRRAFGSGYRRDDDYRGGGDRYEDRYDRRDDRSWSSRDDYSRDDYRRDDRGPPQRPKLNLKPRSTPEEDDSSASTSQSTRAASIFGGAKPVDTAAREREVEERLQKEQEKLQRQWNEPKLERRPRERHPSWRSEETQERERSRTGSESSQTGTSTTSSRNARRRESEKSLENETLNKEEDCHSPTSKPPKPDQPLKVMPAPPPKENAWVKRSSNPPARSQSSDTEQQSPTSGGGKVAPAQPSEEGPGRKDENKVDGMNAPKGQTGNSSRGPGDGGNRDHWKESDRKDGKKDQDSRSAPEPKKPEENPASKFSSASKYAALSVDGEDENEGEDYAE

SEQ ID NO: 506 - protein, 379 aa, Homo sapiens
MAAAAAQGGGGGEPRRTEGVGPGVPGEVEMVKGQPFDVGPRYTQLQYIGEGAYGMVSSAYDHVRKTRVAIKKISPFEHQTYCQRTLREIQILLRFRHENVIGIRDILRASTLEAMRDVYIVQDLMETDLYKLLKSQQLSNDHICYFLYQILRGLKYIHSANVLHRDLKPSNLLSNTTCDLKICDFGLARIADPEHDHTGFLTEYVATRWYRAPEIMLNSKGYTKSIDIWSVGCILAEMLSNRPIFPGKHYLDQLNHILGILGSPSQEDLNCIINMKARNYLQSLPSKTKVAWAKLFPKSDSKALDLLDRMLTFNPNKRITVEEALAHPYLEQYYDPTDEPVAEEPFTFAMELDDLPKERLKELIFQETARFQPGVLEAP

SEQ ID NO: 507 - protein, 351 aa, Homo sapiens
MTWSATARGAHQPDNTAFTQQRLPAWQPLLSASIALPLFFCAGLAFIGLGLGLYYSSNGIKELEYDYTGDPGTGNCSVCAAAGQGRALPPPCSCAWYFSLPELFQGPVYLYYELTNFYQNNRRYGVSRDDAQLSGLPSALRHPVNECAPYQRSAAGLPIAPCGAIANSLFNDSFSLWHQRQPGGPYVEVPLDRSGIAWWTDYHVKFRNPPLVNGSLALAFQGTAPPPNWRRPVYELSPDPNNTGFINQDFVVWMRTAALPTFRKLYARIRQGNYSAGLPRGAYRVNITYNYPVRAFGGHKLLIFSSISWMGGKNPFLGIAYLVVGSLCILTGFVMLVVYIRYQDQDDDDEE

SEQ ID NO: 508 - protein, 524 aa, Homo sapiens
MGKPARKGCEWKRFLKNNWVLLSTVAAVVLGITTGVLVREHSNLSTLEKFYFAFPGEILMRMLKLIILPLIISSMITGVAALDSNVSGKIGVRAVVYYFCTTLIAVILGIVLVVSIKPGVTQKVGEIARTGSTPEVSTVDAMLDLIRNMFPENLVQACFQQYKTKREEVKPPSDPEMNMTEESFTAVMTTAISKNKTKEYKIVGMYSDGINVLGLIVFCLVFGLVIGKMGEKGQILVDFFNALSDATMKIVQIIMCYMPLGILFLIAGKIIEVEDWEIFRKLGLYMATVLTGLAIHSIVILPLIYFIVVRKNPFRFAMGMAQALLTALMISSSSATLPVTFRCAEENNQVDKRITRFVLPVGATINMDGTALYEAVAAVFIAQLNDLDLGIGQIITISITATSASIGAAGVPQAGLVTMVIVLSAVGLPAEDVTLIIAVDWLLDRFRTMVNVLGDAFGTGIVEKLSKKELEQMDVSSEVNIVNPFALESTILDNEDSDTKKSYVNGGFAVDKSDTISFTQTSQF

SEQ ID NO: 509 - protein, 416 aa, Homo sapiens
MAHSPVAVQVPGMQNNIADPEELFTKLERIGKGSFGEVFKGIDNRTQQVVAIKIIDLEEAEDEIEDIQQEITVLSQCDSSYVTKYYGSYLKGSKLWIIMEYLGGGSALDLLRAGPFDEFQIATMLKEILKGLDYLHSEKKIHRDIKAANVLLSEQGDVKLADFGVAGQLTDTQIKRNTFVGTPFWMAPEVIQQSAYDSKADIWSLGITAIELAKGEPPNSDMHPMRVLFLIPKNNPPTLVGDFTKSFKEFIDACLNKDPSFRPTAKELLKHKFIVKNSKKTSYLTELIDRFKRWKAEGHSDDESDSEGSDSESTSRENNTHPEWSFTTVRKKPDPKKVQNGAEQDLVQTLSCLSMIITPAFAELKQQDENNASRNQAIEELEKSIAVAEAACPGITDKMVKKLIEKFQKCSADESP

SEQ ID NO: 510 - protein, 285 aa, Homo sapiens
MVMRPLWSLLLWEALLPITVTGAQVLSKVGGSVLLVAARPPGFQVREAIWRSLWPSEELLATFFRGSLETLYHSRFLGRAQLHSNLSLELGPLESGDSGNFSVLMVDTRGQPWTQTLQLKVYDAVPRPVVQVFIAVERDAQPSKTCQVFLSCWAPNISEITYSWRRETTMDFGMEPHSLFTDGQVLSISLGPGDRDVAYSCIVSNPVSWDLATVTPWDSCHHEAAPGKASYKDVLLVVVPVSLLLMLVTLFSAWHWCPCSGKKKKDVHADRVGPETENPLVQDLP

SEQ ID NO: 511 - protein, 376 aa, Homo sapiens
MNHSERFVFIAEWYDPNASLLRRYELLFYPGDGSVEMHDVKNHRTFLKRTKYDNLHLEDLFIGNKVNVFSRQLVLIDYGDQYTARQLGSRKEKTLALIKPDAISKAGEIIEIINKAGFTITKLKMMMLSRKEALDFHVDHQSRPFFNELIQFITTGPIIAMEILRDDAICEWKRLLGPANSGVARTDASESIRALFGTDGIRNAAHGPDSFASAAREMELFFPSSGGCGPANTAKFTNCTCCIVKPHAVSEGLLGKILMAIRDAGFEISAMQMFNMDRVNVEEFYEVYKGVVTEYHDMVTEMYSGPCVAMEIQQNNATKTFREFCGPADPEIARHLRPGTLRAIFGKTKIQNAVHCTDLPEDGLLEVQYFFKILDN

SEQ ID NO: 512 - DNA, 27 bp, Homo sapiens
ccctcatcctggttctggaatcctcag

SEQ ID NO: 513 - DNA, 19 bp, Homo sapiens
tcggcttgtcctggctctt

SEQ ID NO: 514 - DNA, 20 bp, Homo sapiens
tggctctccgcgtaggataa

SEQ ID NO: 515 - DNA, 20 bp, Homo sapiens
cttggccagaccaatgccca

SEQ ID NO: 516 - DNA, 28 bp, Homo sapiens
cagagtcttaggtaaaagtcttgggaaa

SEQ ID NO: 517 - DNA, 25 bp, Homo sapiens
tgtccttgatattgggacattgtag

SEQ ID NO: 518 - DNA, 37 bp, Homo sapiens
ttttactggttcttctgaattgacagtaaacctgtcc

SEQ ID NO: 519 - DNA, 24 bp, Homo sapiens
aatcgtgctgcttggatagaaata

SEQ ID NO: 520 - DNA, 29 bp, Homo sapiens
caaataatagaacagtaggccattcataa

SEQ ID NO: 521 - DNA, 27 bp, Homo sapiens
tttcgcatagcaaccctccacttttcg

SEQ ID NO: 522 - DNA, 19 bp, Homo sapiens
cagcatcttgcccctcaga

SEQ ID NO: 523 - DNA, 24 bp, Homo sapiens
aattggaatgaaaccacagtcttg

SEQ ID NO: 524 - DNA, 23 bp, Homo sapiens
aaatgcccatctatgtcccttgc

SEQ ID NO: 525 - DNA, 24 bp, Homo sapiens
tccctgaatgtattgaacttggaa

SEQ ID NO: 526 - DNA, 24 bp, Homo sapiens
ttcaggcagcaagttttactttga

SEQ ID NO: 527 - DNA, 32 bp, Homo sapiens
atggcagcagttccaaccttcagaactcaata

SEQ ID NO: 528 - DNA, 20 bp, Homo sapiens
ccctctgctccacagaaacc

SEQ ID NO: 529 - DNA, 21 bp, Homo sapiens
ggtctgcaaagtggccaaaat

SEQ ID NO: 530 - DNA, 22 bp, Homo sapiens
tcccaagccataaagtgcacat

SEQ ID NO: 531 - DNA, 22 bp, Homo sapiens
ggacagcaaaaagacaagcaaa

SEQ ID NO: 532 - DNA, 22 bp, Homo sapiens
ctgtacaatgtcccccaaatca

SEQ ID NO: 533 - DNA, 30 bp, Homo sapiens
attcactgatgaccaaatggagatataacc

SEQ ID NO: 534 - DNA, 26 bp, Homo sapiens
cagttgctgacttctcttatggacat

SEQ ID NO: 535 - DNA, 21 bp, Homo sapiens
attctgtgcaccatgcacaca

SEQ ID NO: 536 - DNA, 28 bp, Homo sapiens
agtatctgagttcaaaattcccaaagga

SEQ ID NO: 537 - DNA, 20 bp, Homo sapiens
tccctctggcagttgtgtga

SEQ ID NO: 538 - DNA, 21 bp, Homo sapiens
tgcacggcaagatgtactgaa

SEQ ID NO: 539 - DNA, 27 bp, Homo sapiens
cagcgcatatcaggatcattagacttt

SEQ ID NO: 540 - DNA, 22 bp, Homo sapiens
aatcaaggagcttggcactctt

SEQ ID NO: 541 - DNA, 26 bp, Homo sapiens
gatgcttttagaatggttcctttgtt

SEQ ID NO: 542 - DNA, 26 bp, Homo sapiens
ttcggccagtctccttaaactagtca

SEQ ID NO: 543 - DNA, 20 bp, Homo sapiens
accagcttggtgcggatagt

SEQ ID NO: 544 - DNA, 22 bp, Homo sapiens
gtgcttttccatccacagattg

SEQ ID NO: 545 - DNA, 25 bp, Homo sapiens
cagcaaagctggctccaacatgctg

SEQ ID NO: 546 - DNA, 20 bp, Homo sapiens
tgtgggccagaagagttcct

SEQ ID NO: 547 - DNA, 17 bp, Homo sapiens
cccatggaccccgatca

SEQ ID NO: 548 - DNA, 32 bp, Homo sapiens
agctccgtgagtgaaccatcattataaacgtg

SEQ ID NO: 549 - DNA, 20 bp, Homo sapiens
gcctacccattcgtggtgat

SEQ ID NO: 550 - DNA, 19 bp, Homo sapiens
tccctaggaggccgtttcc

SEQ ID NO: 551 - DNA, 23 bp, Homo sapiens
cccaccacttgtaggggactgct

SEQ ID NO: 552 - DNA, 23 bp, Homo sapiens
ctcgatctcagagctcagacaca

SEQ ID NO: 553 - DNA, 28 bp, Homo sapiens
gcattcatcccatctactttattttcat

SEQ ID NO: 554 - DNA, 22 bp, Homo sapiens
cagtggccgaggagcccttcac

SEQ ID NO: 555 - DNA, 23 bp, Homo sapiens
agtactatgacccgacggatgag

SEQ ID NO: 556 - DNA, 21 bp, Homo sapiens
tcagccgctccttaggtaggt

SEQ ID NO: 557 - DNA, 24 bp, Homo sapiens
caccagccactttgctaatttctt

SEQ ID NO: 558 - DNA, 24 bp, Homo sapiens
gaacgatgatcttaaaggcacaaa

SEQ ID NO: 559 - DNA, 25 bp, Homo sapiens
tcttgctgcaatgtaaatctgctat

SEQ ID NO: 560 - DNA, 26 bp, Homo sapiens
agaaaaagagcttcccctaacctggg

SEQ ID NO: 561 - DNA, 20 bp, Homo sapiens
tgggttgaacaagccacgtt

SEQ ID NO: 562 - DNA, 23 bp, Homo sapiens
gtcgtgggatttactctgcaaca

SEQ ID NO: 563 - DNA, 30 bp, Homo sapiens
taagtatccctatttcttaagttacgagga

SEQ ID NO: 564 - DNA, 23 bp, Homo sapiens
aatgttgagacaccgttttgctt

SEQ ID NO: 565 - DNA, 31 bp, Homo sapiens
gtagagtcaactaaagatcaaaatgtgaaag

SEQ ID NO: 566 - DNA, 25 bp, Homo sapiens
atcaccttcccccaagattacctga

SEQ ID NO: 567 - DNA, 19 bp, Homo sapiens
ccctttcccacacccactt

SEQ ID NO: 568 - DNA, 19 bp, Homo sapiens
gggatggtgcaagctgaca

SEQ ID NO: 569 - DNA, 26 bp, Homo sapiens
ttgaaatctcagctatgcagatgttc

SEQ ID NO: 570 - DNA, 21 bp, Homo sapiens
tcctgatggctatccgagatg

SEQ ID NO: 571 - DNA, 21 bp, Homo sapiens
cctcaacattaacccgatcca

1. Method for characterizing the state of a neoplastic disease in a subject, comprising
(i) determining the pattern of expression levels of at least 6, 8, 10, 15, 20, 30, or 47 marker genes, comprised in a group of marker genes consisting of SEQ ID NO:1 to 165, in a biological sample from said subject,
(ii) comparing the pattern of expression levels determined in (i) with one or several reference pattern(s) of expression levels,
(iii) characterizing the state of said neoplastic disease in said subject from the outcome of the comparison in step (ii).

2. Method for characterizing the state of a neoplastic disease in a subject, comprising
(i) determining the pattern of expression levels of at least 6, 8, 10, 15, 20, 30, 47 or 67 marker genes, comprised in a group of marker genes consisting of SEQ ID NO:1 to 165 and 472 to 491, in a biological sample from said subject,
(ii) comparing the pattern of expression levels determined in (i) with one or several reference pattern(s) of expression levels,
(iii) characterizing the state of said neoplastic disease in said subject from the outcome of the comparison in step (ii).

3. Method for detection, diagnosis, screening, monitoring, and/or prognosis of a neoplastic disease in a subject, comprising
(i) determining the pattern of expression levels of at least 1, 2, 3, 5, 10, 15, 20, 30, or 47 marker genes, comprised in a group of marker genes consisting of SEQ ID NOs:1 to 17, 19 to 33, 35 to 50, 52 to 64, 66 to 85, 88 to 91, and 93 to 165 in biological samples from said subject,
(ii) comparing the pattern of expression levels determined in (i) with one or several reference pattern(s) of expression levels,
(iii) detecting, diagnosing, screening, monitoring, and/or prognosing said neoplastic disease in said subject from the outcome of the comparison in step (ii).

4. Method for detection, diagnosis, screening, monitoring, and/or prognosis of a neoplastic disease in a subject, comprising
(i) determining the pattern of expression levels of at least 1, 2, 3, 5, 10, 15, 20, 30, 47, or 67 marker genes, comprised in a group of marker genes consisting of SEQ D NOs:1 to 17, 19 to 33, 35 to 50, 52 to 64, 66 to 85, 88 to 91, and 93 to 165 and 472 to 491 in biological samples from said subject,
(ii) comparing the pattern of expression levels determined in (i) with one or several reference pattern(s) of expression levels,
(iii) detecting, diagnosing, screening, monitoring, and/or prognosing said neoplastic disease in said subject from the outcome of the comparison in step (ii).

5. Method of any of claims 1 to 4, wherein said method comprises multiple determinations of a pattern of expression levels, at different points in time, thereby allowing to monitor the development of said neoplastic disease in said subject.

6. Method of claim 1 or 2, wherein said method comprises an estimation of the likelihood of success of a given mode of treatment for said neoplastic disease in said subject.

7. Method of claim 1 or 2, wherein said method comprises an assessment of whether or not the subject is expected to respond to a given mode of treatment for said neoplastic disease.

8. Method of claim 6 or 7, wherein a predictive algorithm is used.

9. Method of claim 8, wherein the predictive algorithm is a Support Vector Machine.

10. Method of any of claims 6 to 9, wherein said given mode of treatment
(i) acts on cell proliferation, and/or
(ii) acts on cell survival, and/or
(iii) acts on cell motility, and/or
(iv) is an anthracycline based mode of treatment, and/or
(v) comprises administration of epirubicin and/or cyclophoshamid.

11. Method of treatment for a subject afflicted with a neoplastic disease, comprising
(i) identifying the most promising mode of treatment with the method of claim 6 or 7,
(ii) treating said neoplastic disease in said patient by the mode of treatment identified in step (i).

12. Method of screening for subjects afflicted with a neoplastic disease, wherein a method of any of claims 1 to 4 is applied to a plurality of subjects.

13. Method of screening for substances and/or therapy modalities having curative effect on a neoplastic disease comprising
(i) obtaining a biological sample from a subject afflicted with said neoplastic disease,
(ii) assessing, from said biological sample, using the method of claim 6 or 7, whether said subject is expected to respond to a given mode of treatment for said neoplastic disease,
(iii) if said subject is expected to respond to said given mode of treatment, incubating said biological sample with said substance under said therapy modalities,
(iv) observing changes in said biological sample triggered by said test substance under said therapy modalities,
(v) selecting or rejecting said test substance and/or said therapy modalities, based on the observation of changes in said biological sample under (iv).

14. Method of screening for compounds having curative effect on a neoplastic disease comprising
(i) incubating biological samples or extracts of these with a test substance,
(ii) determining the pattern of expression levels of at least 1, 2, 3, 5, 10, 15, 20, 30, or 47 marker genes, comprised in a group of marker genes consisting of SEQ ID NO:1 to 17, 19 to 33, 35 to 50, 52 to 64, 66 to 85, 88 to 91, and 93 to 165 in said biological sample,
(iii) comparing the pattern of expression levels determined in (ii) with one or several reference pattern(s),
(iv) selecting or rejecting said test substance, based on the comparison performed under (iii).

15. Method of screening for compounds having curative effect on a neoplastic disease comprising
(i) incubating biological samples or extracts of these with a test substance,
(ii) determining the pattern of expression levels of at least 1, 2, 3, 5, 10, 15, 20, 30, 47, or 67 marker genes, comprised in a group of marker genes consisting of SEQ ID NO:1 to 17, 19 to 33, 35 to 50, 52 to 64, 66 to 85, 88 to 91, and 93 to 165 and 472 to 491 in said biological sample,
(iii) comparing the pattern of expression levels determined in (ii) with one or several reference pattern(s),
(iv) selecting or rejecting said test substance, based on the comparison performed under (iii).

16. Method of any of claims 1 to 15 wherein said marker genes are comprised in a group of marker genes listed in Table 2.

17. Method of any of claims 1 to 16, wherein the expression level is determined
(i) with a hybridization based method, or
(ii) with a hybridization based method utilizing arrayed probes, or
(iii) with a hybridization based method utilizing individually labeled probes, or
(iv) by real time real time PCR, or
(v) by assessing the expression of polypeptides, proteins or derivatives thereof, or
(vi) by assessing the amount of polypeptides, proteins or derivatives thereof.

18. Method of any of claims 1 to 17, wherein the neoplastic disease is breast cancer.

19. A kit comprising at least 6, 8, 10, 15, 20, 30, or 47 primer pairs and probes suitable for marker genes comprised in a group of marker genes consisting of
(i) SEQ ID NO:1 to SEQ ID NO:165, or
(iii) the marker genes listed in Table 2.

20. A kit comprising at least 6, 8, 10, 15, 20, 30, 47, or 67 primer pairs and probes suitable for marker genes comprised in a group of marker genes consisting of
(i) SEQ ID NO: 1 to SEQ ID NO: 165, and/or
(ii) SEQ ID NO:472 to SEQ ID NO:491, or
(iii) the marker genes listed in Table 2.

21. A kit comprising at least 6, 8, 10, 15, 20, 30, or 47 individually labeled probes, each having a sequence comprised in a group of sequences consisting of SEQ ID NO:331 to SEQ ID NO:471.

22. A kit comprising at least 6, 8, 10, 15, 20, 30, 47 or 67 individually labeled probes, each having a sequence comprised in a group of sequences consisting of SEQ ID NO:331 to SEQ ID NO:471 and SEQ ID NO:512 to 571.

23. A kit comprising at least 6, 8, 10, 15, 20, 30, or 47 arrayed probes, each having a sequence comprised in a group of sequences consisting of SEQ ID NO:331 to SEQ ID NO:471.

24. A kit comprising at least 6, 8, 10, 15, 20, 30, 47 or 67 arrayed probes, each having a sequence comprised in a group of sequences consisting of SEQ ID NO:331 to SEQ ID NO:471 and SEQ ID NO:512 to 571.
